(19) United States
(12) Patent Application Publication
(10) Pub. No.: US 2017/0218078 A1
(43) Pub. Date: Aug. 3, 2017

(54) BISPECIFIC T CELL ENGAGING ANTIBODY CONSTRUCTS

(71) Applicant: AMGEN RESEARCH (MUNICH) GMBH, Munich (DE)

(72) Inventors: Tobias Raum, Munich (DE); Markus Münz, Munich (DE); Johannes Brozy, Munich (DE); Peter Kufer, Munich (DE); Patrick Hoffmann, Munich (DE); Matthias Friedrich, Munich (DE); Benno Rattel, Munich (DE); Pamela Bogner, Munich (DE); Andreas Wolf, Munich (DE); Cornelius Pompe, Munich (DE)

(21) Appl. No.: 15/422,647

(22) Filed: Feb. 2, 2017

Related U.S. Application Data
(60) Provisional application No. 62/290,861, filed on Feb. 3, 2016.

(51) Int. Cl. C07K 16/30; C07K 16/46; C07K 16/28

(52) U.S. Cl. CPC C07K 16/30; C07K 16/2809; C07K 16/28; C07K 16/468; C07K 2317/31; C07K 2317/524; C07K 2317/526; C07K 2317/53; C07K 2317/94; C07K 2317/64

(57) ABSTRACT

The present invention provides bispecific antibody constructs of a specific Fc modality characterized by comprising a first domain binding to a target cell surface antigen, a second domain binding to an extracellular epitope of the human and/or the Macaca CD3ε chain and a third domain, which is the specific Fc modality. Moreover, the invention provides a polynucleotide, encoding the antibody construct, a vector comprising this polynucleotide, host cells, expressing the construct and a pharmaceutical composition comprising the same.

### BACKGROUND

[0001] Bispecific molecules such as BiTE® (bispecific T cell engager) antibody constructs are recombinant protein constructs made from two flexibly linked antibody derived binding domains. One binding domain of BiTE® antibody constructs is specific for a selected tumor-associated surface antigen on target cells; the second binding domain is specific for CD3, a subunit of the T cell receptor complex on T cells. By their particular design BiTE® antibody constructs are uniquely suited to transiently connect T cells with target cells and, at the same time, potently activate the inherent cytolytic potential of T cells against target cells. An important further development of the first generation of BiTE® antibody constructs (see WO 99/54440 and WO 2005/040220) developed into the clinic as AMG 103 and AMG 110 was the provision of bispecific antibody constructs binding to a context independent epitope at the N-terminus of the CD3ε chain (WO 2008/119567). BiTE® antibody constructs binding to this elected epitope do not only show cross-species specificity for human and Callithrix jacchus, Saguinus oedipus or Saimiri sciureus CD3ε chain, but also, due to recognizing this specific epitope instead of previously described epitopes for CD3 binders in bispecific T cell engaging molecules, do not unspecifically activate T cells to the same degree as observed for the previous generation of T cell engaging antibodies. This reduction in T cell activation was connected with less or reduced T cell redistribution in patients, which was identified as a risk for side effects.

[0002] Antibody constructs as described in WO 2008/119567 are likely to suffer from rapid clearance from the body; thus, whilst they are able to reach most parts of the body rapidly, and are quick to produce and easier to handle, their in vivo applications may be limited by their brief persistence in vivo. Prolonged administration by continuous intravenous infusion was used to achieve therapeutic effects because of the short in vivo half life of this small, single chain molecule. However, such continuous intravenous infusions are classified as inconvenient for the patients and, thus, in case of more convenient alternative treatment approaches, hamper the election of the compound demonstrated to be more efficient in the treatment of the respective disease. Hence, there is a need in the art for bispecific therapeutics that retain similar therapeutic efficacy that have a format which is straightforward to produce, and that have favorable pharmacokinetic properties, including a longer half-life.

[0003] An increased half-life is generally useful in in vivo applications of immunoglobulins, especially antibodies and most especially antibody fragments of small size. Approaches described in the art to achieve such effect comprise the fusion of the small bispecific antibody construct to larger proteins, which preferably do not interfere with the therapeutic effect of the BiTE® antibody construct. Examples for such further developments of bispecific T cell engagers comprise bispecifc Fc-molecules e.g. described in US 2014/0302037, US 2014/0308285, WO 2014/144722, WO 2014/151910 and WO 2015/048272. An alternative strategy is the use of HSA fused to the bispecific molecule or the mere fusion of human albumin binding peptides (see e.g. WO2013/128027, WO2014/140358).

### SUMMARY

[0004] All the half-life extending formats (HLE formats) of bispecific T cell engaging molecules described in the art, which included the hetero Fc (also designated as hetFc or heterodimeric Fc, hFc) format and the fusion of human serum albumin (also designated as HSA or hALB) had individual disadvantages such as unspecific T cell activation, complement activation, instability or a pharmacokinetic profile, which does not meet the desired half-life prolongation of the molecules. It is thus the object of the present invention to provide a half-life extending format of bispecific T cell engaging molecules, which overcomes at least one and, of course, preferably more than one of these individual defects observed for the state of the art molecules. Accordingly, the present invention provides bispecific antibody constructs of a specific Fc modality characterized by comprising a first domain binding to a target cell surface antigen, a second domain binding to an extracellular epitope of the human and/or the Macaca CD3ε chain and a third domain, which is the specific Fc modality. Moreover, the invention provides a polynucleotide encoding the antibody construct, a vector comprising this polynucleotide, host cells expressing the construct and a pharmaceutical composition comprising the same.

### DESCRIPTION OF THE FIGURES

[0005] FIGS. 1A-1D: FIG. 1A shows a diagram of one embodiment of an antibody construct of the invention. FIG. 1B shows a heterodimeric Fc antibody construct and FIG. 1C shows an X-body construct described in the art. The indicated charged pairs are introduced in order to enforce the heterodimerization. FIG. 1D shows the fusion of an antibody construct with a human serum albumin (HSA or hALB).

[0006] FIGS. 2A-2B: Evaluation of Target-independent T Cell Activation by Mesothelin (MS) HLE BiTE® antibody constructs. FIG. 2A—antibody construct of the invention in 48 h activation assay with human PBMC (3×); HLE BiTE® serial dilutions (start 20 nM; 1:5, 7×+blank); w/o or with FcR blocking [10 mg/mL hulgG (Kiovog, Baxter)]; FACS measurement of CD69 and CD25 [not shown] expression on CD4⁺, CD8⁺ T cells. FIG. 2B—Hetero-Fc antibody construct in 48 h activation assay with human PBMC and CD14⁺/CD33⁺ cell depleted PBMC (3×); HLE BiTE® serial dilutions (start 20 nM; 1:5, 7×+blank); FACS measurement of CD69 and CD25 [not shown] expression on CD4⁺, CD8⁺ T cells.

[0007] FIGS. 3A-3AB: Evaluation of Target-independent T Cell Activation by HLE BiTE® antibody constructs. FIG. 3A—CDH19 antibody construct of the invention in 48 h activation assay with human PBMC (3×); HLE BiTE® serial dilutions (start 20 nM; 1:5, 7×+blank); w/o or with FcR blocking [10 mg/mL hulgG (Kiovog, Baxter)]; FACS measurement of CD69 and CD25 [not shown] expression on CD4⁺, CD8⁺ T cells. FIG. 3B—CDH19 Hetero-Fc antibody construct in 48 h activation assay with human PBMC and CD14+/CD33⁺ cell depleted PBMC (3×); HLE BiTE® serial dilutions (start 20 nM; 1:5, 7×+blank); FACS measurement of CD69 and CD25 [not shown] expression on CD4⁺, CD8⁺ T cells. FIG. 3C—CDH19 X-body construct in 48 h activation assay with human PBMC and CD14+/CD33⁺ cell depleted PBMC (3×); HLE BiTE® serial dilutions (start 20 nM; 1:5, 7×+blank); FACS measurement of CD69 and CD25 [not shown] expression on CD4⁺, CD8+ T cells; FIGS. 3D-3AB—Isolated PBMC from three different healthy human donors were cultured with increasing concentrations of HLE bispecific antibody constructs specific for various target antigens for 48 h. The expression of the activation marker CD69 on CD4+ and CD8+ T cells was determined by flow cytometric analysis using a PE-Cy7 conjugated mab specific for CD69.

[0008] FIG. 4: Complement C1q Binding of BiTE® Fc fusion antibody constructs. BiTE® Fc fusion antibody constructs (BiTE® single chain Fc (triangle), BiTE® hetero Fc (squares), canonical BiTE® (circle)) were coated on a Maxisorp plate (in dilution series), prior to incubation with pooled human serum and incubation with polyclonal anti human CC1q murine antibody, visualized by goat anti-mouse Fc-AP conjugate.

[0009] FIGS. 5A-5E: Mean PK profiles of four pairs of BiTE®-HLE fusion antibody constructs after single dose administration in cynomolgus monkeys. For reasons of comparability, serum concentrations were dose-normalized to 15 μg/kg and indicated in nmol.

[0010] FIG. 6: Mean PK profiles of nine different BiTE® antibody constructs, each fused to a scFc half-life extending moiety. For reasons of comparability, serum concentrations were dose-normalized to 15 μg/kg and indicated in nmol.

[0011] FIG. 7: Bispecific scFc variants D9F (SEQ ID NO: 1453), T2G (SEQ ID NO: 1454), D3L (SEQ ID NO: 1455), T7I (SEQ ID NO: 1456) and K6C (SEQ ID NO: 1457). A preferred antibody construct of the present invention is shown in SEQ ID NO: 1453.

[0012] FIGS. 8A-8B: Surface Plasmon Resonance (SPR)-based determination of binding to human FcRn. Constructs D9F, T2G, D3L, T7I and K6C were each tested for their capability of binding against human FcRn in SPR (Biacore) experiments. The maximal binding during the injection phase was measured for all constructs as the respective response units (RU), equivalent to the molecular mass increase on the FcRn coated CM5 chip due to bound construct. All constructs were measured in duplicates. Average values of the duplicate determinations are depicted in FIGS. 8A and 8B.

[0013] FIG. 9: The constructs D9F, T2G, D3L, T7I and K6C and a human IgG1-kappa antibody MT201 were each tested for their capability of binding against human FcRn in SPR (Biacore) experiments. The maximal binding during the injection phase was measured for all constructs as the respective response units (RU), equivalent to the molecular mass increase on the FcRn coated CM5 chip due to bound construct. All constructs were measured in duplicates. Average values of the duplicate determinations are depicted including standard deviation error bars.

### DETAILED DESCRIPTION

[0014] In addition to the significantly prolonged half-life of bispecific antibody constructs of the invention the fusion of the specific Fc modality, i.e., the third domain according to the present invention, is also responsible for a surprising significant impact on the first and second binding domain of the antibody construct of the invention. Thus, while other half-life extending modalities of T cell engaging antibody constructs show individual preferred features the election of the present specific Fc modality allows for the provision of bispecific molecules, which show a broad spectrum of preferred characteristics of a robust molecular format and, thus, allow for the development of promising pharmaceutical compositions.

[0015] Thus, the present invention provides an antibody construct comprising at least three domains, wherein
[0016] the first domain binds to a target cell surface antigen,
[0017] the second domain binds to an extracellular epitope of the human and/or the Macaca CD3ε chain; and
[0018] the third domain comprises two polypeptide monomers, each comprising a hinge domain, a CH2 domain and a CH3 domain, wherein said two polypeptide monomers are fused to each other via a peptide linker.

[0019] The term “antibody construct” refers to a molecule in which the structure and/or function is/are based on the structure and/or function of an antibody, e.g., of a full-length or whole immunoglobulin molecule and/or is/are drawn from the variable heavy chain (VH) and/or variable light chain (VL) domains of an antibody or fragment thereof. An antibody construct is hence capable of binding to its specific target or antigen. Furthermore, the binding domain of an antibody construct according to the invention comprises the minimum structural requirements of an antibody which allow for the target binding. This minimum requirement may e.g. be defined by the presence of at least the three light chain CDRs (i.e. CDR1, CDR2 and CDR3 of the VL region) and/or the three heavy chain CDRs (i.e. CDR1, CDR2 and CDR3 of the VH region), preferably of all six CDRs. An alternative approach to define the minimal structure requirements of an antibody is the definition of the epitope of the antibody within the structure of the specific target, respectively, the protein domain of the target protein composing the epitope region (epitope cluster) or by reference to an specific antibody competing with the epitope of the defined antibody. The antibodies on which the constructs according to the invention are based include for example monoclonal, recombinant, chimeric, deimmunized, humanized and human antibodies.

[0020] The binding domain of an antibody construct according to the invention may e.g. comprise the above referred groups of CDRs. Preferably, those CDRs are comprised in the framework of an antibody light chain variable region (VL) and an antibody heavy chain variable region (VH); however, it does not have to comprise both. Fd fragments, for example, have two VH regions and often retain some antigen-binding function of the intact antigen-binding domain. Additional examples for the format of antibody fragments, antibody variants or binding domains include (1) a Fab fragment, a monovalent fragment having the VL, VH, CL and CH1 domains; (2) a F(ab′)₂ fragment, a bivalent fragment having two Fab fragments linked by a disulfide bridge at the hinge region; (3) an Fd fragment having the two VH and CH1 domains; (4) an Fv fragment having the VL and VH domains of a single arm of an antibody, (5) a dAb fragment (Ward et al., (1989) Nature 341:544-546), which has a VH domain; (6) an isolated complementarity determining region (CDR), and (7) a single chain Fv (scFv), the latter being preferred (for example, derived from an scFV-library). Examples for embodiments of antibody constructs according to the invention are e.g. described in WO 00/006605, WO 2005/040220, WO 2008/119567, WO 2010/037838, WO 2013/026837, WO 2013/026833, US 2014/0308285, US 2014/0302037, WO 2014/144722, WO 2014/151910, and WO 2015/048272.

[0021] Also within the definition of “binding domain” or “domain which binds” are fragments of full-length antibodies, such as VH, VHH, VL, (s)dAb, Fv, Fd, Fab, Fab′, F(ab′)₂ or “r IgG” (“half antibody”). Antibody constructs according to the invention may also comprise modified fragments of antibodies, also called antibody variants, such as scFv, di-scFv or bi(s)-scFv, scFv-Fc, scFv-zipper, scFab, Fab₂, Fab₃, diabodies, single chain diabodies, tandem diabodies (Tandab's), tandem di-scFv, tandem tri-scFv, “multibodies” such as triabodies or tetrabodies, and single domain antibodies such as nanobodies or single variable domain antibodies comprising merely one variable domain, which might be VHH, VH or VL, that specifically bind an antigen or epitope independently of other V regions or domains.

[0022] As used herein, the terms “single-chain Fv,” “single-chain antibodies” or “scFv” refer to single polypeptide chain antibody fragments that comprise the variable regions from both the heavy and light chains, but lack the constant regions. Generally, a single-chain antibody further comprises a polypeptide linker between the VH and VL domains which enables it to form the desired structure which would allow for antigen binding. Single chain antibodies are discussed in detail by Pluckthun in The Pharmacology of Monoclonal Antibodies, vol. 113, Rosenburg and Moore eds. Springer-Verlag, New York, pp. 269-315 (1994). Various methods of generating single chain antibodies are known, including those described in U.S. Pat. Nos. 4,694,778 and 5,260,203; International Patent Application Publication No. WO 88/01649; Bird (1988) Science 242:423-442; Huston et al. (1988) Proc. Natl. Acad. Sci. USA 85:5879-5883; Ward et al. (1989) Nature 334:54454; Skerra et al. (1988) Science 242:1038-1041. In specific embodiments, single-chain antibodies can also be bispecific, multispecific, human, and/or humanized and/or synthetic.

[0023] Furthermore, the definition of the term “antibody construct” includes monovalent, bivalent and polyvalent/multivalent constructs and, thus, bispecific constructs, specifically binding to only two antigenic structure, as well as polyspecific/multispecific constructs, which specifically bind more than two antigenic structures, e.g. three, four or more, through distinct binding domains. Moreover, the definition of the term “antibody construct” includes molecules consisting of only one polypeptide chain as well as molecules consisting of more than one polypeptide chain, which chains can be either identical (homodimers, homotrimers or homo oligomers) or different (heterodimer, heterotrimer or heterooligomer). Examples for the above identified antibodies and variants or derivatives thereof are described inter alia in Harlow and Lane, Antibodies a laboratory manual, CSHL Press (1988) and Using Antibodies: a laboratory manual, CSHL Press (1999), Kontermann and Dibel, Antibody Engineering, Springer, 2nd ed. 2010 and Little, Recombinant Antibodies for Immunotherapy, Cambridge University Press 2009.

[0024] The term “bispecific” as used herein refers to an antibody construct which is “at least bispecific”, i.e., it comprises at least a first binding domain and a second binding domain, wherein the first binding domain binds to one antigen or target (here: the target cell surface antigen), and the second binding domain binds to another antigen or target (here: CD3). Accordingly, antibody constructs according to the invention comprise specificities for at least two different antigens or targets. For example, the first domain does preferably not bind to an extracellular epitope of CD3ε of one or more of the species as described herein. The term “target cell surface antigen” refers to an antigenic structure expressed by a cell and which is present at the cell surface such that it is accessible for an antibody construct as described herein. It may be a protein, preferably the extracellular portion of a protein, or a carbohydrate structure, preferably a carbohydrate structure of a protein, such as a glycoprotein. It is preferably a tumor antigen. The term “bispecific antibody construct” of the invention also encompasses multispecific antibody constructs such as trispecific antibody constructs, the latter ones including three binding domains, or constructs having more than three (e.g. four, five . . . ) specificities.

[0025] Given that the antibody constructs according to the invention are (at least) bispecific, they do not occur naturally and they are markedly different from naturally occurring products. A “bispecific” antibody construct or immunoglobulin is hence an artificial hybrid antibody or immunoglobulin having at least two distinct binding sides with different specificities. Bispecific antibody constructs can be produced by a variety of methods including fusion of hybridomas or linking of Fab′ fragments. See, e.g., Songsivilai & Lachmann, Clin. Exp. Immunol. 79:315-321 (1990).

[0026] The at least two binding domains and the variable domains (VH/VL) of the antibody construct of the present invention may or may not comprise peptide linkers (spacer peptides). The term “peptide linker” comprises in accordance with the present invention an amino acid sequence by which the amino acid sequences of one (variable and/or binding) domain and another (variable and/or binding) domain of the antibody construct of the invention are linked with each other. The peptide linkers can also be used to fuse the third domain to the other domains of the antibody construct of the invention. An essential technical feature of such peptide linker is that it does not comprise any polymerization activity. Among the suitable peptide linkers are those described in U.S. Pat. Nos. 4,751,180 and 4,935,233 or WO 88/09344. The peptide linkers can also be used to attach other domains or modules or regions (such as half-life extending domains) to the antibody construct of the invention.

[0027] The antibody constructs of the present invention are preferably “in vitro generated antibody constructs”. This term refers to an antibody construct according to the above definition where all or part of the variable region (e.g., at least one CDR) is generated in a non-immune cell selection, e.g., an in vitro phage display, protein chip or any other method in which candidate sequences can be tested for their ability to bind to an antigen. This term thus preferably excludes sequences generated solely by genomic rearrangement in an immune cell in an animal. A “recombinant antibody” is an antibody made through the use of recombinant DNA technology or genetic engineering.

[0028] The term “monoclonal antibody” (mAb) or monoclonal antibody construct as used herein refers to an antibody obtained from a population of substantially homogeneous antibodies, i.e., the individual antibodies comprising the population are identical except for possible naturally occurring mutations and/or post-translation modifications (e.g., isomerizations, amidations) that may be present in minor amounts. Monoclonal antibodies are highly specific, being directed against a single antigenic side or determinant on the antigen, in contrast to conventional (polyclonal) antibody preparations which typically include different antibodies directed against different determinants (or epitopes). In addition to their specificity, the monoclonal antibodies are advantageous in that they are synthesized by the hybridoma culture, hence uncontaminated by other immunoglobulins. The modifier “monoclonal” indicates the character of the antibody as being obtained from a substantially homogeneous population of antibodies, and is not to be construed as requiring production of the antibody by any particular method.

[0029] For the preparation of monoclonal antibodies, any technique providing antibodies produced by continuous cell line cultures can be used. For example, monoclonal antibodies to be used may be made by the hybridoma method first described by Koehler et al., Nature, 256: 495 (1975), or may be made by recombinant DNA methods (see, e.g., U.S. Pat. No. 4,816,567). Examples for further techniques to produce human monoclonal antibodies include the trioma technique, the human B-cell hybridoma technique (Kozbor, Immunology Today 4 (1983), 72) and the EBV-hybridoma technique (Cole et al., Monoclonal Antibodies and Cancer Therapy, Alan R. Liss, Inc. (1985), 77-96).

[0030] Hybridomas can then be screened using standard methods, such as enzyme-linked immunosorbent assay (ELISA) and surface plasmon resonance (BIACORE™) analysis, to identify one or more hybridomas that produce an antibody that specifically binds with a specified antigen. Any form of the relevant antigen may be used as the immunogen, e.g., recombinant antigen, naturally occurring forms, any variants or fragments thereof, as well as an antigenic peptide thereof. Surface plasmon resonance as employed in the BIAcore system can be used to increase the efficiency of phage antibodies which bind to an epitope of a target cell surface antigen, (Schier, Human Antibodies Hybridomas 7 (1996), 97-105; Malmborg, J. Immunol. Methods 183 (1995), 7-13).

[0031] Another exemplary method of making monoclonal antibodies includes screening protein expression libraries, e.g., phage display or ribosome display libraries. Phage display is described, for example, in Ladner et al., U.S. Pat. No. 5,223,409; Smith (1985) Science 228:1315-1317, Clackson et al., Nature, 352: 624-628 (1991) and Marks et al., J. Mol. Biol., 222: 581-597 (1991).

[0032] In addition to the use of display libraries, the relevant antigen can be used to immunize a non-human animal, e.g., a rodent (such as a mouse, hamster, rabbit or rat). In one embodiment, the non-human animal includes at least a part of a human immunoglobulin gene. For example, it is possible to engineer mouse strains deficient in mouse antibody production with large fragments of the human Ig (immunoglobulin) loci. Using the hybridoma technology, antigen-specific monoclonal antibodies derived from the genes with the desired specificity may be produced and selected. See, e.g., XENOMOUSE™, Green et al. (1994) Nature Genetics 7:13-21, US 2003-0070185, WO 96/34096, and WO 96/33735.

[0033] A monoclonal antibody can also be obtained from a non-human animal, and then modified, e.g., humanized, deimmunized, rendered chimeric etc., using recombinant DNA techniques known in the art. Examples of modified antibody constructs include humanized variants of non-human antibodies, “affinity matured” antibodies (see, e.g. Hawkins et al. J. Mol. Biol. 254, 889-896 (1992) and Lowman et al., Biochemistry 30, 10832-10837 (1991)) and antibody mutants with altered effector function(s) (see, e.g., U.S. Pat. No. 5,648,260, Kontermann and Dibel (2010), loc. cit. and Little (2009), loc. cit.).

[0034] In immunology, affinity maturation is the process by which B cells produce antibodies with increased affinity for antigen during the course of an immune response. With repeated exposures to the same antigen, a host will produce antibodies of successively greater affinities. Like the natural prototype, the in vitro affinity maturation is based on the principles of mutation and selection. The in vitro affinity maturation has successfully been used to optimize antibodies, antibody constructs, and antibody fragments. Random mutations inside the CDRs are introduced using radiation, chemical mutagens or error-prone PCR. In addition, the genetic diversity can be increased by chain shuffling. Two or three rounds of mutation and selection using display methods like phage display usually results in antibody fragments with affinities in the low nanomolar range.

[0035] A preferred type of an amino acid substitutional variation of the antibody constructs involves substituting one or more hypervariable region residues of a parent antibody (e.g. a humanized or human antibody). Generally, the resulting variant(s) selected for further development will have improved biological properties relative to the parent antibody from which they are generated. A convenient way for generating such substitutional variants involves affinity maturation using phage display. Briefly, several hypervariable region sides (e.g. 6-7 sides) are mutated to generate all possible amino acid substitutions at each side. The antibody variants thus generated are displayed in a monovalent fashion from filamentous phage particles as fusions to the gene III product of M13 packaged within each particle. The phage-displayed variants are then screened for their biological activity (e.g. binding affinity) as herein disclosed. In order to identify candidate hypervariable region sides for modification, alanine scanning mutagenesis can be performed to identify hypervariable region residues contributing significantly to antigen binding. Alternatively, or additionally, it may be beneficial to analyze a crystal structure of the antigen-antibody complex to identify contact points between the binding domain and, e.g., human target cell surface antigen. Such contact residues and neighboring residues are candidates for substitution according to the techniques elaborated herein. Once such variants are generated, the panel of variants is subjected to screening as described herein and antibodies with superior properties in one or more relevant assays may be selected for further development.

[0036] The monoclonal antibodies and antibody constructs of the present invention specifically include “chimeric” antibodies (immunoglobulins) in which a portion of the heavy and/or light chain is identical with or homologous to corresponding sequences in antibodies derived from a particular species or belonging to a particular antibody class or subclass, while the remainder of the chain(s) is/are identical with or homologous to corresponding sequences in antibodies derived from another species or belonging to another antibody class or subclass, as well as fragments of such antibodies, so long as they exhibit the desired biological activity (U.S. Pat. No. 4,816,567; Morrison et al., Proc. Natl. Acad. Sci. USA, 81: 6851-6855 (1984)). Chimeric antibodies of interest herein include “primitized” antibodies comprising variable domain antigen-binding sequences derived from a non-human primate (e.g., Old World Monkey, Ape etc.) and human constant region sequences. A variety of approaches for making chimeric antibodies have been described. See e.g., Morrison et al., Proc. Natl. Acad. Sci U.S.A. 81:6851, 1985; Takeda et al., Nature 314:452, 1985, Cabilly et al., U.S. Pat. No. 4,816,567; Boss et al., U.S. Pat. No. 4,816,397; Tanaguchi et al., EP 0171496; EP 0173494; and GB 2177096.

[0037] An antibody, antibody construct, antibody fragment or antibody variant may also be modified by specific deletion of human T cell epitopes (a method called “deimmunization”) by the methods disclosed for example in WO 98/52976 or WO 00/34317. Briefly, the heavy and light chain variable domains of an antibody can be analyzed for peptides that bind to MHC class II; these peptides represent potential T cell epitopes (as defined in WO 98/52976 and WO 00/34317). For detection of potential T cell epitopes, a computer modeling approach termed “peptide threading” can be applied, and in addition a database of human MHC class II binding peptides can be searched for motifs present in the VH and VL sequences, as described in WO 98/52976 and WO 00/34317. These motifs bind to any of the 18 major MHC class II DR allotypes, and thus constitute potential T cell epitopes. Potential T cell epitopes detected can be eliminated by substituting small numbers of amino acid residues in the variable domains, or preferably, by single amino acid substitutions. Typically, conservative substitutions are made. Often, but not exclusively, an amino acid common to a position in human germline antibody sequences may be used. Human germline sequences are disclosed e.g. in Tomlinson, et al. (1992) J. Mol. Biol. 227:776-798; Cook, G. P. et al. (1995) Immunol. Today Vol. 16 (5): 237-242; and Tomlinson et al. (1995) EMBO J. 14: 14:4628-4638. The V BASE directory provides a comprehensive directory of human immunoglobulin variable region sequences (compiled by Tomlinson, L A. et al. MRC Centre for Protein Engineering, Cambridge, UK). These sequences can be used as a source of human sequence, e.g., for framework regions and CDRs. Consensus human framework regions can also be used, for example as described in U.S. Pat. No. 6,300,064.

[0038] “Humanized” antibodies, antibody constructs, variants or fragments thereof (such as Fv, Fab, Fab′, F(ab′)2 or other antigen-binding subsequences of antibodies) are antibodies or immunoglobulins of mostly human sequences, which contain (a) minimal sequence(s) derived from non-human immunoglobulin. For the most part, humanized antibodies are human immunoglobulins (recipient antibody) in which residues from a hypervariable region (also CDR) of the recipient are replaced by residues from a hypervariable region of a non-human (e.g., rodent) species (donor antibody) such as mouse, rat, hamster or rabbit having the desired specificity, affinity, and capacity. In some instances, Fv framework region (FR) residues of the human immunoglobulin are replaced by corresponding non-human residues. Furthermore, “humanized antibodies” as used herein may also comprise residues which are found neither in the recipient antibody nor the donor antibody. These modifications are made to further refine and optimize antibody performance. The humanized antibody may also comprise at least a portion of an immunoglobulin constant region (Fc), typically that of a human immunoglobulin. For further details, see Jones et al., Nature, 321: 522-525 (1986); Reichmann et al., Nature, 332: 323-329 (1988); and Presta, Curr. Op. Struct. Biol., 2: 593-596 (1992).

[0039] Humanized antibodies or fragments thereof can be generated by replacing sequences of the Fv variable domain that are not directly involved in antigen binding with equivalent sequences from human Fv variable domains. Exemplary methods for generating humanized antibodies or fragments thereof are provided by Morrison (1985) Science 229:1202-1207; by Oi et al. (1986) BioTechniques 4:214; and by U.S. Pat. No. 5,585,089; U.S. Pat. No. 5,693,761; U.S. Pat. No. 5,693,762; U.S. Pat. No. 5,859,205; and U.S. Pat. No. 6,407,213. Those methods include isolating, manipulating, and expressing the nucleic acid sequences that encode all or part of immunoglobulin Fv variable domains from at least one of a heavy or light chain. Such nucleic acids may be obtained from a hybridoma producing an antibody against a predetermined target, as described above, as well as from other sources. The recombinant DNA encoding the humanized antibody molecule can then be cloned into an appropriate expression vector.

[0040] Humanized antibodies may also be produced using transgenic animals such as mice that express human heavy and light chain genes, but are incapable of expressing the endogenous mouse immunoglobulin heavy and light chain genes. Winter describes an exemplary CDR grafting method that may be used to prepare the humanized antibodies described herein (U.S. Pat. No. 5,225,539). All of the CDRs of a particular human antibody may be replaced with at least a portion of a non-human CDR, or only some of the CDRs may be replaced with non-human CDRs. It is only necessary to replace the number of CDRs required for binding of the humanized antibody to a predetermined antigen.

[0041] A humanized antibody can be optimized by the introduction of conservative substitutions, consensus sequence substitutions, germline substitutions and/or back mutations. Such altered immunoglobulin molecules can be made by any of several techniques known in the art, (e.g., Teng et al., Proc. Natl. Acad. Sci. U.S.A., 80: 7308-7312, 1983; Kozbor et al., Immunology Today, 4: 7279, 1983; Olsson et al., Meth. Enzymol, 92: 3-16, 1982, and EP 239 400).

[0042] The term “human antibody”, “human antibody construct” and “human binding domain” includes antibodies, antibody constructs and binding domains having antibody regions such as variable and constant regions or domains which correspond substantially to human germline immunoglobulin sequences known in the art, including, for example, those described by Kabat et al. (1991) (loc. cit.). The human antibodies, antibody constructs or binding domains of the invention may include amino acid residues not encoded by human germline immunoglobulin sequences (e.g., mutations introduced by random or side-specific mutagenesis in vitro or by somatic mutation in vivo), for example in the CDRs, and in particular, in CDR3. The human antibodies, antibody constructs or binding domains can have at least one, two, three, four, five, or more positions replaced with an amino acid residue that is not encoded by the human germline immunoglobulin sequence. The definition of human antibodies, antibody constructs and binding domains as used herein, however, also contemplates “fully human antibodies”, which include only non-artificially and/or genetically altered human sequences of antibodies as those can be derived by using technologies or systems such as the Xenomouse. Preferably, a “fully human antibody” does not include amino acid residues not encoded by human germline immunoglobulin sequences

[0043] In some embodiments, the antibody constructs of the invention are “isolated” or “substantially pure” antibody constructs. “Isolated” or “substantially pure”, when used to describe the antibody constructs disclosed herein, means an antibody construct that has been identified, separated and/or recovered from a component of its production environment. Preferably, the antibody construct is free or substantially free of association with all other components from its production environment. Contaminant components of its production environment, such as that resulting from recombinant transfected cells, are materials that would typically interfere with diagnostic or therapeutic uses for the polypeptide, and may include enzymes, hormones, and other proteinaceous or non-proteinaceous solutes. The antibody constructs may e.g constitute at least about 5%, or at least about 50% by weight of the total protein in a given sample. It is understood that the isolated protein may constitute from 5% to 99.9% by weight of the total protein content, depending on the circumstances. The polypeptide may be made at a significantly higher concentration through the use of an inducible promoter or high expression promoter, such that it is made at increased concentration levels. The definition includes the production of an antibody construct in a wide variety of organisms and/or host cells that are known in the art. In preferred embodiments, the antibody construct will be purified (1) to a degree sufficient to obtain at least 15 residues of N-terminal or internal amino acid sequence by use of a spinning cup sequenator, or (2) to homogeneity by SDS-PAGE under non-reducing or reducing conditions using Coomassie blue or, preferably, silver stain. Ordinarily, however, an isolated antibody construct will be prepared by at least one purification step.

[0044] The term “binding domain” characterizes in connection with the present invention a domain which (specifically) binds to/interacts with/recognizes a given target epitope or a given target side on the target molecules (antigens), e.g. CD33 and CD3, respectively. The structure and function of the first binding domain (recognizing e.g. CD33), and preferably also the structure and/or function of the second binding domain (recognizing CD3), is/are based on the structure and/or function of an antibody, e.g. of a full-length or whole immunoglobulin molecule and/or is/are drawn from the variable heavy chain (VH) and/or variable light chain (VL) domains of an antibody or fragment thereof. Preferably the first binding domain is characterized by the presence of three light chain CDRs (i.e. CDR1, CDR2 and CDR3 of the VL region) and/or three heavy chain CDRs (i.e. CDR1, CDR2 and CDR3 of the VH region). The second binding domain preferably also comprises the minimum structural requirements of an antibody which allow for the target binding. More preferably, the second binding domain comprises at least three light chain CDRs (i.e. CDR1, CDR2 and CDR3 of the VL region) and/or three heavy chain CDRs (i.e. CDR1, CDR2 and CDR3 of the VH region). It is envisaged that the first and/or second binding domain is produced by or obtainable by phage-display or library screening methods rather than by grafting CDR sequences from a pre-existing (monoclonal) antibody into a scaffold.

[0045] According to the present invention, binding domains are in the form of one or more polypeptides. Such polypeptides may include proteinaceous parts and non-proteinaceous parts (e.g. chemical linkers or chemical cross-linking agents such as glutaraldehyde). Proteins (including fragments thereof, preferably biologically active fragments, and peptides, usually having less than 30 amino acids) comprise two or more amino acids coupled to each other via a covalent peptide bond (resulting in a chain of amino acids).

[0046] The term “polypeptide” as used herein describes a group of molecules, which usually consist of more than 30 amino acids. Polypeptides may further form multimers such as dimers, trimers and higher oligomers, i.e., consisting of more than one polypeptide molecule. Polypeptide molecules forming such dimers, trimers etc. may be identical or non-identical. The corresponding higher order structures of such multimers are, consequently, termed homo- or heterodimers, homo- or heterotrimers etc. An example for a heteromultimer is an antibody molecule, which, in its naturally occurring form, consists of two identical light polypeptide chains and two identical heavy polypeptide chains. The terms “peptide”, “polypeptide” and “protein” also refer to naturally modified peptides/polypeptides/proteins wherein the modification is effected e.g. by post-translational modifications like glycosylation, acetylation, phosphorylation and the like. A “peptide”, “polypeptide” or “protein” when referred to herein may also be chemically modified such as pegylated. Such modifications are well known in the art and described herein below.

[0047] Preferably the binding domain which binds to the target cell surface antigen and/or the binding domain which binds to CD3ε is/are human binding domains. Antibodies and antibody constructs comprising at least one human binding domain avoid some of the problems associated with antibodies or antibody constructs that possess non-human such as rodent (e.g. murine, rat, hamster or rabbit) variable and/or constant regions. The presence of such rodent derived proteins can lead to the rapid clearance of the antibodies or antibody constructs or can lead to the generation of an immune response against the antibody or antibody construct by a patient. In order to avoid the use of rodent derived antibodies or antibody constructs, human or fully human antibodies/antibody constructs can be generated through the introduction of human antibody function into a rodent so that the rodent produces fully human antibodies.

[0048] The ability to clone and reconstruct megabase-sized human loci in YACs and to introduce them into the mouse germline provides a powerful approach to elucidating the functional components of very large or crudely mapped loci as well as generating useful models of human disease. Furthermore, the use of such technology for substitution of mouse loci with their human equivalents could provide unique insights into the expression and regulation of human gene products during development, their communication with other systems, and their involvement in disease induction and progression.

[0049] An important practical application of such a strategy is the “humanization” of the mouse humoral immune system. Introduction of human immunoglobulin (Ig) loci into mice in which the endogenous Ig genes have been inactivated offers the opportunity to study the mechanisms underlying programmed expression and assembly of antibodies as well as their role in B-cell development. Furthermore, such a strategy could provide an ideal source for production of fully human monoclonal antibodies (mAbs)—an important milestone towards fulfilling the promise of antibody therapy in human disease. Fully human antibodies or antibody constructs are expected to minimize the immunogenic and allergic responses intrinsic to mouse or mouse-derivatized mAbs and thus to increase the efficacy and safety of the administered antibodies/antibody constructs. The use of fully human antibodies or antibody constructs can be expected to provide a substantial advantage in the treatment of chronic and recurring human diseases, such as inflammation, autoimmunity, and cancer, which require repeated compound administrations.

[0050] One approach towards this goal was to engineer mouse strains deficient in mouse antibody production with large fragments of the human Ig loci in anticipation that such mice would produce a large repertoire of human antibodies in the absence of mouse antibodies. Large human Ig fragments would preserve the large variable gene diversity as well as the proper regulation of antibody production and expression. By exploiting the mouse machinery for antibody diversification and selection and the lack of immunological tolerance to human proteins, the reproduced human antibody repertoire in these mouse strains should yield high affinity antibodies against any antigen of interest, including human antigens. Using the hybridoma technology, antigen-specific human mAbs with the desired specificity could be readily produced and selected. This general strategy was demonstrated in connection with the generation of the first XenoMouse mouse strains (see Green et al. Nature Genetics 7:13-21 (1994)). The XenoMouse strains were engineered with yeast artificial chromosomes (YACs) containing 245 kb and 190 kb-sized germline configuration fragments of the human heavy chain locus and kappa light chain locus, respectively, which contained core variable and constant region sequences. The human Ig containing YACs proved to be compatible with the mouse system for both rearrangement and expression of antibodies and were capable of substituting for the inactivated mouse Ig genes. This was demonstrated by their ability to induce B cell development, to produce an adult-like human repertoire of fully human antibodies, and to generate antigen-specific human mAbs. These results also suggested that introduction of larger portions of the human Ig loci containing greater numbers of V genes, additional regulatory elements, and human Ig constant regions might recapitulate substantially the full repertoire that is characteristic of the human humoral response to infection and immunization. The work of Green et al. was recently extended to the introduction of greater than approximately 80% of the human antibody repertoire through introduction of megabase sized, germline configuration YAC fragments of the human heavy chain loci and kappa light chain loci, respectively. See Mendez et al. Nature Genetics 15:146-156 (1997) and U.S. patent application Ser. No. 08/759,620.

[0051] The production of the XenoMouse mice is further discussed and delineated in U.S. patent application Ser. No. 07/466,008, Ser. No. 07/610,515, Ser. No. 07/919,297, Ser. No. 07/922,649, Ser. No. 08/031,801, Ser. No. 08/112,848, Ser. No. 08/234,145, Ser. No. 08/376,279, Ser. No. 08/430,938, Ser. No. 08/464,584, Ser. No. 08/464,582, Ser. No. 08/463,191, Ser. No. 08/462,837, Ser. No. 08/486,853, Ser. No. 08/486,857, Ser. No. 08/486,859, Ser. No. 08/462,513, Ser. No. 08/724,752, and Ser. No. 08/759,620; and U.S. Pat. Nos. 6,162,963; 6,150,584; 6,114,598; 6,075,181, and 5,939,598 and Japanese Patent Nos. 3 068 180 B2, 3 068 506 B2, and 3 068 507 B2. See also Mendez et al. Nature Genetics 15:146-156 (1997) and Green and Jakobovits J. Exp. Med. 188:483-495 (1998), EP 0 463 151 B1, WO 94/02602, WO 96/34096, WO 98/24893, WO 00/76310, and WO 03/47336.

[0052] In an alternative approach, others, including GenPharm International, Inc., have utilized a “minilocus” approach. In the minilocus approach, an exogenous Ig locus is mimicked through the inclusion of pieces (individual genes) from the Ig locus. Thus, one or more VH genes, one or more DH genes, one or more JH genes, a mu constant region, and a second constant region (preferably a gamma constant region) are formed into a construct for insertion into an animal. This approach is described in U.S. Pat. No. 5,545,807 to Surani et al. and U.S. Pat. Nos. 5,545,806; 5,625,825; 5,625,126; 5,633,425; 5,661,016; 5,770,429; 5,789,650; 5,814,318; 5,877,397; 5,874,299; and 6,255,458 each to Lonberg and Kay, U.S. Pat. Nos. 5,591,669 and 6,023,010 to Krimpenfort and Berns, U.S. Pat. Nos. 5,612,205; 5,721,367; and U.S. Pat. No. 5,789,215 to Berns et al., and U.S. Pat. No. 5,643,763 to Choi and Dunn, and GenPharm International U.S. patent application Ser. No. 07/574,748, Ser. No. 07/575,962, Ser. No. 07/810,279, Ser. No. 07/853,408, Ser. No. 07/904,068, Ser. No. 07/990,860, Ser. No. 08/053,131, Ser. No. 08/096,762, Ser. No. 08/155,301, Ser. No. 08/161,739, Ser. No. 08/165,699, Ser. No. 08/209,741. See also EP 0 546 073 B1, WO 92/03918, WO 92/22645, WO 92/22647, WO 92/22670, WO 93/12227, WO 94/00569, WO 94/25585, WO 96/14436, WO 97/13852, and WO 98/24884 and U.S. Pat. No. 5,981,175. See further Taylor et al. (1992), Chen et al. (1993), Tuaillon et al. (1993), Choi et al. (1993), Lonberg et al. (1994), Taylor et al. (1994), and Tuaillon et al. (1995), Fishwild et al. (1996).

[0053] Kirin has also demonstrated the generation of human antibodies from mice in which, through microcell fusion, large pieces of chromosomes, or entire chromosomes, have been introduced. See European Patent Application Nos. 773 288 and 843 961. Xenerex Biosciences is developing a technology for the potential generation of human antibodies. In this technology, SCID mice are reconstituted with human lymphatic cells, e.g., B and/or T cells. Mice are then immunized with an antigen and can generate an immune response against the antigen. See U.S. Pat. Nos. 5,476,996; 5,698,767; and 5,958,765.

[0054] Human anti-mouse antibody (HAMA) responses have led the industry to prepare chimeric or otherwise humanized antibodies. It is however expected that certain human anti-chimeric antibody (HACA) responses will be observed, particularly in chronic or multi-dose utilizations of the antibody. Thus, it would be desirable to provide antibody constructs comprising a human binding domain against the target cell surface antigen and a human binding domain against CD3ε in order to vitiate concerns and/or effects of HAMA or HACA response.

[0055] The terms “(specifically) binds to”, (specifically) recognizes”, “is (specifically) directed to”, and “(specifically) reacts with” mean in accordance with this invention that a binding domain interacts or specifically interacts with a given epitope or a given target side on the target molecules (antigens), here: target cell surface antigen and CD3ε, respectively.

[0056] The term “epitope” refers to a side on an antigen to which a binding domain, such as an antibody or immunoglobulin, or a derivative, fragment or variant of an antibody or an immunoglobulin, specifically binds. An “epitope” is antigenic and thus the term epitope is sometimes also referred to herein as “antigenic structure” or “antigenic determinant”. Thus, the binding domain is an “antigen interaction side”. Said binding/interaction is also understood to define a “specific recognition”.

[0057] “Epitopes” can be formed both by contiguous amino acids or non-contiguous amino acids juxtaposed by tertiary folding of a protein. A “linear epitope” is an epitope where an amino acid primary sequence comprises the recognized epitope. A linear epitope typically includes at least 3 or at least 4, and more usually, at least 5 or at least 6 or at least 7, for example, about 8 to about 10 amino acids in a unique sequence.

[0058] A “conformational epitope”, in contrast to a linear epitope, is an epitope wherein the primary sequence of the amino acids comprising the epitope is not the sole defining component of the epitope recognized (e.g., an epitope wherein the primary sequence of amino acids is not necessarily recognized by the binding domain). Typically a conformational epitope comprises an increased number of amino acids relative to a linear epitope. With regard to recognition of conformational epitopes, the binding domain recognizes a three-dimensional structure of the antigen, preferably a peptide or protein or fragment thereof (in the context of the present invention, the antigenic structure for one of the binding domains is comprised within the target cell surface antigen protein). For example, when a protein molecule folds to form a three-dimensional structure, certain amino acids and/or the polypeptide backbone forming the conformational epitope become juxtaposed enabling the antibody to recognize the epitope. Methods of determining the conformation of epitopes include, but are not limited to, x-ray crystallography, two-dimensional nuclear magnetic resonance (2D-NMR) spectroscopy and site-directed spin labelling and electron paramagnetic resonance (EPR) spectroscopy.

[0059] A method for epitope mapping is described in the following: When a region (a contiguous amino acid stretch) in the human target cell surface antigen protein is exchanged/replaced with its corresponding region of a non-human and non-primate target cell surface antigen (e.g., mouse target cell surface antigen, but others like chicken, rat, hamster, rabbit etc. might also be conceivable), a decrease in the binding of the binding domain is expected to occur, unless the binding domain is cross-reactive for the non-human, non-primate target cell surface antigen used. Said decrease is preferably at least 10%, 20%, 30%, 40%, or 50%; more preferably at least 60%, 70%, or 80%, and most preferably 90%, 95% or even 100% in comparison to the binding to the respective region in the human target cell surface antigen protein, whereby binding to the respective region in the human target cell surface antigen protein is set to be 100%. It is envisaged that the aforementioned human target cell surface antigen/non-human target cell surface antigen chimeras are expressed in CHO cells. It is also envisaged that the human target cell surface antigen/non-human target cell surface antigen chimeras are fused with a transmembrane domain and/or cytoplasmic domain of a different membrane-bound protein such as EpCAM.

[0060] In an alternative or additional method for epitope mapping, several truncated versions of the human target cell surface antigen extracellular domain can be generated in order to determine a specific region that is recognized by a binding domain. In these truncated versions, the different extracellular target cell surface antigen domains/sub-domains or regions are stepwise deleted, starting from the N-terminus. It is envisaged that the truncated target cell surface antigen versions may be expressed in CHO cells. It is also envisaged that the truncated target cell surface antigen versions may be fused with a transmembrane domain and/or cytoplasmic domain of a different membrane-bound protein such as EpCAM. It is also envisaged that the truncated target cell surface antigen versions may encompass a signal peptide domain at their N-terminus, for example a signal peptide derived from mouse IgG heavy chain signal peptide. It is furthermore envisaged that the truncated target cell surface antigen versions may encompass a v5 domain at their N-terminus (following the signal peptide) which allows verifying their correct expression on the cell surface. A decrease or a loss of binding is expected to occur with those truncated target cell surface antigen versions which do not encompass any more the target cell surface antigen region that is recognized by the binding domain. The decrease of binding is preferably at least 10%, 20%, 30%, 40%, 50%; more preferably at least 60%, 70%, 80%, and most preferably 90%, 95% or even 100%, whereby binding to the entire human target cell surface antigen protein (or its extracellular region or domain) is set to be 100.

[0061] A further method to determine the contribution of a specific residue of a target cell surface antigen to the recognition by an antibody construct or binding domain is alanine scanning (see e.g. Morrison K L & Weiss G A. Cur Opin Chem Biol. 2001 June; 5(3):302-7), where each residue to be analyzed is replaced by alanine, e.g. via site-directed mutagenesis. Alanine is used because of its non-bulky, chemically inert, methyl functional group that nevertheless mimics the secondary structure references that many of the other amino acids possess. Sometimes bulky amino acids such as valine or leucine can be used in cases where conservation of the size of mutated residues is desired. Alanine scanning is a mature technology which has been used for a long period of time.

[0062] The interaction between the binding domain and the epitope or the region comprising the epitope implies that a binding domain exhibits appreciable affinity for the epitope/the region comprising the epitope on a particular protein or antigen (here: target cell surface antigen and CD3, respectively) and, generally, does not exhibit significant reactivity with proteins or antigens other than the target cell surface antigen or CD3. “Appreciable affinity” includes binding with an affinity of about 10⁻⁶ M (KD) or stronger. Preferably, binding is considered specific when the binding affinity is about 10⁻¹² to 10⁻⁸ M, 10⁻¹² to 10⁻⁹ M, 10⁻¹² to 10⁻¹⁰ M, 10⁻¹¹ to 10⁻⁸ M, preferably of about 10⁻¹¹ to 10⁻⁹ M. Whether a binding domain specifically reacts with or binds to a target can be tested readily by, inter alia, comparing the reaction of said binding domain with a target protein or antigen with the reaction of said binding domain with proteins or antigens other than the target cell surface antigen or CD3. Preferably, a binding domain of the invention does not essentially or substantially bind to proteins or antigens other than the target cell surface antigen or CD3 (i.e., the first binding domain is not capable of binding to proteins other than the target cell surface antigen and the second binding domain is not capable of binding to proteins other than CD3). It is an envisaged characteristic of the antibody constructs according to the present invention to have superior affinity characteristics in comparison to other HLE formats. Such a superior affinity, in consequence, suggests a prolonged half-life in vivo. The longer half-life of the antibody constructs according to the present invention may reduce the duration and frequency of administration which typically contributes to improved patient compliance. This is of particular importance as the antibody constructs of the present invention are particularly beneficial for highly weakened or even multimorbide cancer patients.

[0063] The term “does not essentially/substantially bind” or “is not capable of binding” means that a binding domain of the present invention does not bind a protein or antigen other than the target cell surface antigen or CD3, i.e., does not show reactivity of more than 30%, preferably not more than 20%, more preferably not more than 10%, particularly preferably not more than 9%, 8%, 7%, 6% or 5% with proteins or antigens other than the target cell surface antigen or CD3, whereby binding to the target cell surface antigen or CD3, respectively, is set to be 100%.

[0064] Specific binding is believed to be effected by specific motifs in the amino acid sequence of the binding domain and the antigen. Thus, binding is achieved as a result of their primary, secondary and/or tertiary structure as well as the result of secondary modifications of said structures. The specific interaction of the antigen-interaction-side with its specific antigen may result in a simple binding of said side to the antigen. Moreover, the specific interaction of the antigen-interaction-side with its specific antigen may alternatively or additionally result in the initiation of a signal, e.g. due to the induction of a change of the conformation of the antigen, an oligomerization of the antigen, etc.

[0065] The term “variable” refers to the portions of the antibody or immunoglobulin domains that exhibit variability in their sequence and that are involved in determining the specificity and binding affinity of a particular antibody (i.e., the “variable domain(s)”). The pairing of a variable heavy chain (VH) and a variable light chain (VL) together forms a single antigen-binding side.

[0066] Variability is not evenly distributed throughout the variable domains of antibodies; it is concentrated in sub-domains of each of the heavy and light chain variable regions. These sub-domains are called “hypervariable regions” or “complementarity determining regions” (CDRs). The more conserved (i.e., non-hypervariable) portions of the variable domains are called the “framework” regions (FRM or FR) and provide a scaffold for the six CDRs in three dimensional space to form an antigen-binding surface. The variable domains of naturally occurring heavy and light chains each comprise four FRM regions (FR1, FR2, FR3, and FR4), largely adopting a β-sheet configuration, connected by three hypervariable regions, which form loops connecting, and in some cases forming part of, the β-sheet structure. The hypervariable regions in each chain are held together in close proximity by the FRM and, with the hypervariable regions from the other chain, contribute to the formation of the antigen-binding side (see Kabat et al., loc. cit.).

[0067] The terms “CDR”, and its plural “CDRs”, refer to the complementarity determining region of which three make up the binding character of a light chain variable region (CDR-L1, CDR-L2 and CDR-L3) and three make up the binding character of a heavy chain variable region (CDR-H1, CDR-H2 and CDR-H3). CDRs contain most of the residues responsible for specific interactions of the antibody with the antigen and hence contribute to the functional activity of an antibody molecule: they are the main determinants of antigen specificity.

[0068] The exact definitional CDR boundaries and lengths are subject to different classification and numbering systems. CDRs may therefore be referred to by Kabat, Chothia, contact or any other boundary definitions, including the numbering system described herein.

[0069] Despite differing boundaries, each of these systems has some degree of overlap in what constitutes the so called “hypervariable regions” within the variable sequences. CDR definitions according to these systems may therefore differ in length and boundary areas with respect to the adjacent framework region. See for example Kabat (an approach based on cross-species sequence variability), Chothia (an approach based on crystallographic studies of antigen-antibody complexes), and/or MacCallum (Kabat et al., loc. cit.; Chothia et al., J. Mol. Biol, 1987, 196: 901-917; and MacCallum et al., J. Mol. Biol, 1996, 262: 732). Still another standard for characterizing the antigen binding side is the AbM definition used by Oxford Molecular's AbM antibody modeling software. See, e.g., Protein Sequence and Structure Analysis of Antibody Variable Domains. In: Antibody Engineering Lab Manual (Ed.: Duebel, S. and Kontermann, R., Springer-Verlag, Heidelberg). To the extent that two residue identification techniques define regions of overlapping, but not identical regions, they can be combined to define a hybrid CDR. However, the numbering in accordance with the so-called Kabat system is preferred.

[0070] Typically, CDRs form a loop structure that can be classified as a canonical structure. The term “canonical structure” refers to the main chain conformation that is adopted by the antigen binding (CDR) loops. From comparative structural studies, it has been found that five of the six antigen binding loops have only a limited repertoire of available conformations.

[0071] Each canonical structure can be characterized by the torsion angles of the polypeptide backbone. Correspondent loops between antibodies may, therefore, have very similar three dimensional structures, despite high amino acid sequence variability in most parts of the loops (Chothia and Lesk, J. Mol. Biol., 1987, 196: 901; Chothia et al., Nature, 1989, 342: 877; Martin and Thornton, J. Mol. Biol, 1996, 263: 800). Furthermore, there is a relationship between the adopted loop structure and the amino acid sequences surrounding it. The conformation of a particular canonical class is determined by the length of the loop and the amino acid residues residing at key positions within the loop, as well as within the conserved framework (i.e., outside of the loop). Assignment to a particular canonical class can therefore be made based on the presence of these key amino acid residues.

[0072] The term “canonical structure” may also include considerations as to the linear sequence of the antibody, for example, as catalogued by Kabat (Kabat et al., loc. cit.). The Kabat numbering scheme (system) is a widely adopted standard for numbering the amino acid residues of an antibody variable domain in a consistent manner and is the preferred scheme applied in the present invention as also mentioned elsewhere herein. Additional structural considerations can also be used to determine the canonical structure of an antibody. For example, those differences not fully reflected by Kabat numbering can be described by the numbering system of Chothia et al. and/or revealed by other techniques, for example, crystallography and two- or three-dimensional computational modeling. Accordingly, a given antibody sequence may be placed into a canonical class which allows for, among other things, identifying appropriate chassis sequences (e.g., based on a desire to include a variety of canonical structures in a library). Kabat numbering of antibody amino acid sequences and structural considerations as described by Chothia et al., loc. cit. and their implications for construing canonical aspects of antibody structure, are described in the literature. The subunit structures and three-dimensional configurations of different classes of immunoglobulins are well known in the art. For a review of the antibody structure, see Antibodies: A Laboratory Manual, Cold Spring Harbor Laboratory, eds. Harlow et al., 1988.

[0073] The CDR3 of the light chain and, particularly, the CDR3 of the heavy chain may constitute the most important determinants in antigen binding within the light and heavy chain variable regions. In some antibody constructs, the heavy chain CDR3 appears to constitute the major area of contact between the antigen and the antibody. In vitro selection schemes in which CDR3 alone is varied can be used to vary the binding properties of an antibody or determine which residues contribute to the binding of an antigen. Hence, CDR3 is typically the greatest source of molecular diversity within the antibody-binding side. H3, for example, can be as short as two amino acid residues or greater than 26 amino acids.

[0074] In a classical full-length antibody or immunoglobulin, each light (L) chain is linked to a heavy (H) chain by one covalent disulfide bond, while the two H chains are linked to each other by one or more disulfide bonds depending on the H chain isotype. The CH domain most proximal to VH is usually designated as CH1. The constant (“C”) domains are not directly involved in antigen binding, but exhibit various effector functions, such as antibody-dependent, cell-mediated cytotoxicity and complement activation. The Fc region of an antibody is comprised within the heavy chain constant domains and is for example able to interact with cell surface located Fc receptors.

[0075] The sequence of antibody genes after assembly and somatic mutation is highly varied, and these varied genes are estimated to encode 10¹⁰ different antibody molecules (Immunoglobulin Genes, 2^{nd} ed., eds. Jonio et al., Academic Press, San Diego, Calif., 1995). Accordingly, the immune system provides a repertoire of immunoglobulins. The term “repertoire” refers to at least one nucleotide sequence derived wholly or partially from at least one sequence encoding at least one immunoglobulin. The sequence(s) may be generated by rearrangement in vivo of the V, D, and J segments of heavy chains, and the V and J segments of light chains. Alternatively, the sequence(s) can be generated from a cell in response to which rearrangement occurs, e.g., in vitro stimulation. Alternatively, part or all of the sequence(s) may be obtained by DNA splicing, nucleotide synthesis, mutagenesis, and other methods, see, e.g., U.S. Pat. No. 5,565,332. A repertoire may include only one sequence or may include a plurality of sequences, including ones in a genetically diverse collection.

[0076] The term “Fc portion” or “Fc monomer” means in connection with this invention a polypeptide comprising at least one domain having the function of a CH2 domain and at least one domain having the function of a CH3 domain of an immunoglobulin molecule. As apparent from the term “Fc monomer”, the polypeptide comprising those CH domains is a “polypeptide monomer”. An Fc monomer can be a polypeptide comprising at least a fragment of the constant region of an immunoglobulin excluding the first constant region immunoglobulin domain of the heavy chain (CH1), but maintaining at least a functional part of one CH2 domain and a functional part of one CH3 domain, wherein the CH2 domain is amino terminal to the CH3 domain. In a preferred aspect of this definition, an Fc monomer can be a polypeptide constant region comprising a portion of the Ig-Fc hinge region, a CH2 region and a CH3 region, wherein the hinge region is amino terminal to the CH2 domain. It is envisaged that the hinge region of the present invention promotes dimerization. Such Fc polypeptide molecules can be obtained by papain digestion of an immunoglobulin region (of course resulting in a dimer of two Fc polypeptide), for example and not limitation. In another aspect of this definition, an Fc monomer can be a polypeptide region comprising a portion of a CH2 region and a CH3 region. Such Fc polypeptide molecules can be obtained by pepsin digestion of an immunoglobulin molecule, for example and not limitation. In one embodiment, the polypeptide sequence of an Fc monomer is substantially similar to an Fc polypeptide sequence of: an IgG₁ Fc region, an IgG₂ Fc region, an IgG₃ Fc region, an IgG₄ Fc region, an IgM Fc region, an IgA Fc region, an IgD Fc region and an IgE Fc region. (See, e.g., Padlan, Molecular Immunology, 31(3), 169-217 (1993)). Because there is some variation between immunoglobulins, and solely for clarity, Fc monomer refers to the last two heavy chain constant region immunoglobulin domains of IgA, IgD, and IgG, and the last three heavy chain constant region immunoglobulin domains of IgE and IgM. As mentioned, the Fc monomer can also include the flexible hinge N-terminal to these domains. For IgA and IgM, the Fc monomer may include the J chain. For IgG, the Fc portion comprises immunoglobulin domains CH2 and CH3 and the hinge between the first two domains and CH2. Although the boundaries of the Fc portion may vary an example for a human IgG heavy chain Fc portion comprising a functional hinge, CH2 and CH3 domain can be defined e.g. to comprise residues D231 (of the hinge domain—corresponding to D234 in Table 1 below)) to P476, respectively L476 (for IgG₄) of the carboxyl-terminus of the CH3 domain, wherein the numbering is according to Kabat. The two Fc portions or Fc monomers, which are fused to each other via a peptide linker define the third domain of the antibody construct of the invention, which may also be defined as scFc domain.

[0077] In one embodiment of the invention it is envisaged that a scFc domain as disclosed herein, respectively the Fc monomers fused to each other are comprised only in the third domain of the antibody construct.

[0078] In line with the present invention an IgG hinge region can be identified by analogy using the Kabat numbering as set forth in Table 1. In line with the above, it is envisaged that a hinge domain/region of the present invention comprises the amino acid residues corresponding to the IgG₁ sequence stretch of D234 to P243 according to the Kabat numbering. It is likewise envisaged that a hinge domain/region of the present invention comprises or consists of the IgG1 hinge sequence DKTHTCPPCP (SEQ ID NO: 1449) (corresponding to the stretch D234 to P243 as shown in Table 1 below—variations of said sequence are also envisaged provided that the hinge region still promotes dimerization). In a preferred embodiment of the invention the glycosylation site at Kabat position 314 of the CH2 domains in the third domain of the antibody construct is removed by a N314X substitution, wherein X is any amino acid excluding Q. Said substitution is preferably a N314G substitution. In a more preferred embodiment, said CH2 domain additionally comprises the following substitutions (position according to Kabat) V321C and R309C (these substitutions introduce the intra domain cysteine disulfide bridge at Kabat positions 309 and 321).

[0079] It is also envisaged that the third domain of the antibody construct of the invention comprises or consists in an amino to carboxyl order: DKTHTCPPCP (SEQ ID NO: 1449) (i.e. hinge) —CH2-CH3-linker-DKTHTCPPCP (SEQ ID NO: 1449) (i.e. hinge) —CH2-CH3. The peptide linker of the aforementioned antibody construct is in a preferred embodiment characterized by the amino acid sequence Gly-Gly-Gly-Gly-Ser, i.e. Gly₄Ser (SEQ ID NO: 1), or polymers thereof, i.e. (Gly₄Ser)x, where x is an integer of 5 or greater (e.g. 5, 6, 7, 8 etc. or greater), 6 being preferred ((Gly4Ser)6). Said construct may further comprise the aforementioned substitutions N314X, preferably N314G, and/or the further substitutions V321C and R309C. In a preferred embodiment of the antibody constructs of the invention as defined herein before, it is envisaged that the second domain binds to an extracellular epitope of the human and/or the Macaca CD3ε chain.

TABLE 1
Kabat numbering of the amino
acid residues of the hinge region

| IMGT | IgG₁ | |
|---|---|---|
| numbering | amino acid | Kabat |
| for the hinge | translation | numbering |
| 1 | (E) | 226 |
| 2 | P | 227 |
| 3 | K | 228 |
| 4 | S | 232 |
| 5 | C | 233 |
| 6 | D | 234 |
| 7 | K | 235 |
| 8 | T | 236 |
| 9 | H | 237 |
| 10 | T | 238 |
| 11 | C | 239 |
| 12 | P | 240 |
| 13 | P | 241 |
| 14 | C | 242 |
| 15 | P | 243 |

[0080] In further embodiments of the present invention, the hinge domain/region comprises or consists of the IgG2 subtype hinge sequence ERKCCVECPPCP (SEQ ID NO: 1450), the IgG3 subtype hinge sequence ELKTPLDTTHTCPRCP (SEQ ID NO: 1451) or ELKTPLGDTTHTCPRCP (SEQ ID NO: 1458), and/or the IgG4 subtype hinge sequence ESKYGPPCPSCP (SEQ ID NO: 1452). The IgG1 subtype hinge sequence may be the following one EPKSCDKTHTCPPCP (as shown in Table 1 and SEQ ID NO: 1459). These core hinge regions are thus also envisaged in the context of the present invention.

[0081] The location and sequence of the IgG CH2 and IgG CD3 domain can be identified by analogy using the Kabat numbering as set forth in Table 2:

TABLE 2
Kabat numbering of the amino acid residues of the IgG CH2 and
CH3 region

| IgG | CH2 aa | CH2 Kabat | CH3 aa | CH3 Kabat |
|---|---|---|---|---|
| subtype | translation | numbering | translation | numbering |
| IgG₁ | APE......KAK | 244......360 | GQP......PGK | 361......478 |
| IgG₂ | APP......KTK | 244......360 | GQP......PGK | 361......478 |
| IgG₃ | APE......KTK | 244......360 | GQP......PGK | 361......478 |
| IgG₄ | APE......KAK | 244......360 | GQP......LGK | 361......478 |

[0082] In one embodiment of the invention the emphasized bold amino acid residues in the CH3 domain of the first or both Fc monomers are deleted.

[0083] The peptide linker, by whom the polypeptide monomers (“Fc portion” or “Fc monomer”) of the third domain are fused to each other, preferably comprises at least 25 amino acid residues (25, 26, 27, 28, 29, 30 etc.). More preferably, this peptide linker comprises at least 30 amino acid residues (30, 31, 32, 33, 34, 35 etc.). It is also preferred that the linker comprises up to 40 amino acid residues, more preferably up to 35 amino acid residues, most preferably exactly 30 amino acid residues. A preferred embodiment of such peptide linker is characterized by the amino acid sequence Gly-Gly-Gly-Gly-Ser, i.e. Gly₄Ser (SEQ ID NO: 1), or polymers thereof, i.e. (Gly₄Ser)x, where x is an integer of 5 or greater (e.g. 6, 7 or 8). Preferably the integer is 6 or 7, more preferably the integer is 6.

[0084] In the event that a linker is used to fuse the first domain to the second domain, or the first or second domain to the third domain, this linker is preferably of a length and sequence sufficient to ensure that each of the first and second domains can, independently from one another, retain their differential binding specificities. For peptide linkers which connect the at least two binding domains (or two variable domains) in the antibody construct of the invention, those peptide linkers are preferred which comprise only a few number of amino acid residues, e.g. 12 amino acid residues or less. Thus, peptide linkers of 12, 11, 10, 9, 8, 7, 6 or 5 amino acid residues are preferred. An envisaged peptide linker with less than 5 amino acids comprises 4, 3, 2 or one amino acid(s), wherein Gly-rich linkers are preferred. A preferred embodiment of the peptide linker for a fusion the first and the second domain is depicted in SEQ ID NO:1. A preferred linker embodiment of the peptide linker for a fusion the second and the third domain is a (Gly)₄-linker, respectively G₄-linker.

[0085] A particularly preferred “single” amino acid in the context of one of the above described “peptide linker” is Gly. Accordingly, said peptide linker may consist of the single amino acid Gly. In a preferred embodiment of the invention a peptide linker is characterized by the amino acid sequence Gly-Gly-Gly-Gly-Ser, i.e. Gly₄Ser (SEQ ID NO: 1), or polymers thereof, i.e. (Gly₄Ser)x, where x is an integer of 1 or greater (e.g. 2 or 3). Preferred linkers are depicted in SEQ ID NOs: 1 to 12. The characteristics of said peptide linker, which comprise the absence of the promotion of secondary structures, are known in the art and are described e.g. in Dall'Acqua et al. (Biochem. (1998) 37, 9266-9273), Cheadle et al. (Mol Immunol (1992) 29, 21-30) and Raag and Whitlow (FASEB (1995) 9(1), 73-80). Peptide linkers which furthermore do not promote any secondary structures are preferred. The linkage of said domains to each other can be provided, e.g., by genetic engineering, as described in the examples. Methods for preparing fused and operatively linked bispecific single chain constructs and expressing them in mammalian cells or bacteria are well-known in the art (e.g. WO 99/54440 or Sambrook et al., Molecular Cloning: A Laboratory Manual, Cold Spring Harbor Laboratory Press, Cold Spring Harbor, N.Y., 2001).

[0086] In a preferred embodiment of the antibody construct or the present invention the first and second domain form an antibody construct in a format selected from the group consisting of (scFv)₂, scFv-single domain mAb, diabody and oligomers of any of the those formats

[0087] According to a particularly preferred embodiment, and as documented in the appended examples, the first and the second domain of the antibody construct of the invention is a “bispecific single chain antibody construct”, more prefereably a bispecific “single chain Fv” (scFv). Although the two domains of the Fv fragment, VL and VH, are coded for by separate genes, they can be joined, using recombinant methods, by a synthetic linker—as described hereinbefore—that enables them to be made as a single protein chain in which the VL and VH regions pair to form a monovalent molecule; see e.g., Huston et al. (1988) Proc. Natl. Acad. Sci USA 85:5879-5883). These antibody fragments are obtained using conventional techniques known to those with skill in the art, and the fragments are evaluated for function in the same manner as are whole or full-length antibodies. A single-chain variable fragment (scFv) is hence a fusion protein of the variable region of the heavy chain (VH) and of the light chain (VL) of immunoglobulins, usually connected with a short linker peptide of about ten to about 25 amino acids, preferably about 15 to 20 amino acids. The linker is usually rich in glycine for flexibility, as well as serine or threonine for solubility, and can either connect the N-terminus of the VH with the C-terminus of the VL, or vice versa. This protein retains the specificity of the original immunoglobulin, despite removal of the constant regions and introduction of the linker.

[0088] Bispecific single chain antibody constructs are known in the art and are described in WO 99/54440, Mack, J. Immunol. (1997), 158, 3965-3970, Mack, PNAS, (1995), 92, 7021-7025, Kufer, Cancer Immunol. Immunother, (1997), 45, 193-197, Loffler, Blood, (2000), 95, 6, 2098-2103, Brihl, Immunol., (2001), 166, 2420-2426, Kipriyanov, J. Mol. Biol., (1999), 293, 41-56. Techniques described for the production of single chain antibodies (see, inter alia, U.S. Pat. No. 4,946,778, Kontermann and Dibel (2010), loc. cit. and Little (2009), loc. cit.) can be adapted to produce single chain antibody constructs specifically recognizing (an) elected target(s).

[0089] Bivalent (also called divalent) or bispecific single-chain variable fragments (bi-scFvs or di-scFvs having the format (scFv)₂ can be engineered by linking two scFv molecules (e.g. with linkers as described hereinbefore). If these two scFv molecules have the same binding specificity, the resulting (scFv)₂ molecule will preferably be called bivalent (i.e. it has two valences for the same target epitope). If the two scFv molecules have different binding specificities, the resulting (scFv)₂ molecule will preferably be called bispecific. The linking can be done by producing a single peptide chain with two VH regions and two VL regions, yielding tandem scFvs (see e.g. Kufer P. et al., (2004) Trends in Biotechnology 22(5):238-244). Another possibility is the creation of scFv molecules with linker peptides that are too short for the two variable regions to fold together (e.g. about five amino acids), forcing the scFvs to dimerize. This type is known as diabodies (see e.g. Hollinger, Philipp et al., (July 1993) Proceedings of the National Academy of Sciences of the United States of America 90 (14): 6444-8).

[0090] In line with this invention either the first, the second or the first and the second domain may comprise a single domain antibody, respectively the variable domain or at least the CDRs of a single domain antibody. Single domain antibodies comprise merely one (monomeric) antibody variable domain which is able to bind selectively to a specific antigen, independently of other V regions or domains. The first single domain antibodies were engineered from heavy chain antibodies found in camelids, and these are called V_{H}H fragments. Cartilaginous fishes also have heavy chain antibodies (IgNAR) from which single domain antibodies called V_{NAR} fragments can be obtained. An alternative approach is to split the dimeric variable domains from common immunoglobulins e.g. from humans or rodents into monomers, hence obtaining VH or VL as a single domain Ab. Although most research into single domain antibodies is currently based on heavy chain variable domains, nanobodies derived from light chains have also been shown to bind specifically to target epitopes. Examples of single domain antibodies are called sdAb, nanobodies or single variable domain antibodies.

[0091] A (single domain mAb)₂ is hence a monoclonal antibody construct composed of (at least) two single domain monoclonal antibodies, which are individually selected from the group comprising V_{H}, VL, V_{H}H and V_{NAR}. The linker is preferably in the form of a peptide linker. Similarly, an “scFv-single domain mAb” is a monoclonal antibody construct composed of at least one single domain antibody as described above and one scFv molecule as described above. Again, the linker is preferably in the form of a peptide linker.

[0092] Whether or not an antibody construct competes for binding with another given antibody construct can be measured in a competition assay such as a competitive ELISA or a cell-based competition assay. Avidin-coupled microparticles (beads) can also be used. Similar to an avidin-coated ELISA plate, when reacted with a biotinylated protein, each of these beads can be used as a substrate on which an assay can be performed. Antigen is coated onto a bead and then precoated with the first antibody. The second antibody is added and any additional binding is determined. Possible means for the read-out includes flow cytometry.

[0093] T cells or T lymphocytes are a type of lymphocyte (itself a type of white blood cell) that play a central role in cell-mediated immunity. There are several subsets of T cells, each with a distinct function. T cells can be distinguished from other lymphocytes, such as B cells and NK cells, by the presence of a T cell receptor (TCR) on the cell surface. The TCR is responsible for recognizing antigens bound to major histocompatibility complex (MHC) molecules and is composed of two different protein chains. In 95% of the T cells, the TCR consists of an alpha (a) and beta (3) chain. When the TCR engages with antigenic peptide and MHC (peptide/MHC complex), the T lymphocyte is activated through a series of biochemical events mediated by associated enzymes, co-receptors, specialized adaptor molecules, and activated or released transcription factors.

[0094] The CD3 receptor complex is a protein complex and is composed of four chains. In mammals, the complex contains a CD3γ (gamma) chain, a CD36 (delta) chain, and two CD3ε (epsilon) chains. These chains associate with the T cell receptor (TCR) and the so-called ξ (zeta) chain to form the T cell receptor CD3 complex and to generate an activation signal in T lymphocytes. The CD3γ (gamma), CD3δ (delta), and CD3ε (epsilon) chains are highly related cell-surface proteins of the immunoglobulin superfamily containing a single extracellular immunoglobulin domain. The intracellular tails of the CD3 molecules contain a single conserved motif known as an immunoreceptor tyrosine-based activation motif or ITAM for short, which is essential for the signaling capacity of the TCR. The CD3 epsilon molecule is a polypeptide which in humans is encoded by the CD3ε gene which resides on chromosome 11. The most preferred epitope of CD3 epsilon is comprised within amino acid residues 1-27 of the human CD3 epsilon extracellular domain. It is envisaged that antibody constructs according to the present invention typically and advantageously show less unspecific T cell activation, which is not desired in specific immunotherapy. This translates to a reduced risk of side effects.

[0095] The redirected lysis of target cells via the recruitment of T cells by a multispecific, at least bispecific, antibody construct involves cytolytic synapse formation and delivery of perforin and granzymes. The engaged T cells are capable of serial target cell lysis, and are not affected by immune escape mechanisms interfering with peptide antigen processing and presentation, or clonal T cell differentiation; see, for example, WO 2007/042261.

[0096] Cytotoxicity mediated by antibody constructs of the invention can be measured in various ways. Effector cells can be e.g. stimulated enriched (human) CD8 positive T cells or unstimulated (human) peripheral blood mononuclear cells (PBMC). If the target cells are of macaque origin or express or are transfected with macaque target cell surface antigen which is bound by the first domain, the effector cells should also be of macaque origin such as a macaque T cell line, e.g. 4119LnPx. The target cells should express (at least the extracellular domain of) the target cell surface antigen, e.g. human or macaque target cell surface antigen. Target cells can be a cell line (such as CHO) which is stably or transiently transfected with target cell surface antigen, e.g. human or macaque target cell surface antigen. Alternatively, the target cells can be a target cell surface antigen positive natural expresser cell line. Usually EC₅₀ values are expected to be lower with target cell lines expressing higher levels of target cell surface antigen on the cell surface. The effector to target cell (E:T) ratio is usually about 10:1, but can also vary. Cytotoxic activity of target cell surface antigenxCD3 bispecific antibody constructs can be measured in a ⁵¹Cr-release assay (incubation time of about 18 hours) or in a in a FACS-based cytotoxicity assay (incubation time of about 48 hours). Modifications of the assay incubation time (cytotoxic reaction) are also possible. Other methods of measuring cytotoxicity are well-known to the skilled person and comprise MTT or MTS assays, ATP-based assays including bioluminescent assays, the sulforhodamine B (SRB) assay, WST assay, clonogenic assay and the ECIS technology.

[0097] The cytotoxic activity mediated by target cell surface antigenxCD3 bispecific antibody constructs of the present invention is preferably measured in a cell-based cytotoxicity assay. It may also be measured in a ⁵¹Cr-release assay. It is represented by the EC₅₀ value, which corresponds to the half maximal effective concentration (concentration of the antibody construct which induces a cytotoxic response halfway between the baseline and maximum). Preferably, the EC₅₀ value of the target cell surface antigenxCD3 bispecific antibody constructs is ≦5000 pM or ≦4000 pM, more preferably ≦3000 pM or ≦2000 pM, even more preferably ≦1000 pM or ≦500 pM, even more preferably ≦400 pM or ≦300 pM, even more preferably ≦200 pM, even more preferably ≦100 pM, even more preferably ≦50 pM, even more preferably ≦20 pM or ≦10 pM, and most preferably ≦5 pM.

[0098] The above given EC₅₀ values can be measured in different assays. The skilled person is aware that an EC₅₀ value can be expected to be lower when stimulated/enriched CD8⁺ T cells are used as effector cells, compared with unstimulated PBMC. It can furthermore be expected that the EC₅₀ values are lower when the target cells express a high number of the target cell surface antigen compared with a low target expression rat. For example, when stimulated/enriched human CD8⁺ T cells are used as effector cells (and either target cell surface antigen transfected cells such as CHO cells or target cell surface antigen positive human cell lines are used as target cells), the EC₅₀ value of the target cell surface antigenxCD3 bispecific antibody construct is preferably ≦1000 pM, more preferably ≦500 pM, even more preferably ≦250 pM, even more preferably ≦100 pM, even more preferably 550 pM, even more preferably ≦10 pM, and most preferably ≦5 pM. When human PBMCs are used as effector cells, the EC₅₀ value of the target cell surface antigenxCD3 bispecific antibody construct is preferably ≦5000 pM or ≦4000 pM (in particular when the target cells are target cell surface antigen positive human cell lines), more preferably ≦2000 pM (in particular when the target cells are target cell surface antigen transfected cells such as CHO cells), more preferably ≦1000 pM or ≦500 pM, even more preferably ≦200 pM, even more preferably ≦150 pM, even more preferably ≦100 pM, and most preferably ≦50 pM, or lower. When a macaque T cell line such as LnPx4119 is used as effector cells, and a macaque target cell surface antigen transfected cell line such as CHO cells is used as target cell line, the EC₅₀ value of the target cell surface antigenxCD3 bispecific antibody construct is preferably ≦2000 pM or ≦1500 pM, more preferably ≦1000 pM or ≦500 pM, even more preferably ≦300 pM or ≦250 pM, even more preferably ≦100 pM, and most preferably ≦50 pM.

[0099] Preferably, the target cell surface antigenxCD3 bispecific antibody constructs of the present invention do not induce/mediate lysis or do not essentially induce/mediate lysis of target cell surface antigen negative cells such as CHO cells. The term “do not induce lysis”, “do not essentially induce lysis”, “do not mediate lysis” or “do not essentially mediate lysis” means that an antibody construct of the present invention does not induce or mediate lysis of more than 30%, preferably not more than 20%, more preferably not more than 10%, particularly preferably not more than 9%, 8%, 7%, 6% or 5% of target cell surface antigen negative cells, whereby lysis of a target cell surface antigen positive human cell line is set to be 100%. This usually applies for concentrations of the antibody construct of up to 500 nM. The skilled person knows how to measure cell lysis without further ado. Moreover, the present specification teaches specific instructions how to measure cell lysis.

[0100] The difference in cytotoxic activity between the monomeric and the dimeric isoform of individual target cell surface antigenxCD3 bispecific antibody constructs is referred to as “potency gap”. This potency gap can e.g. be calculated as ratio between EC₅₀ values of the molecule's monomeric and dimeric form. Potency gaps of the target cell surface antigenxCD3 bispecific antibody constructs of the present invention are preferably ≦5, more preferably ≦4, even more preferably ≦3, even more preferably ≦2 and most preferably ≦1.

[0101] The first and/or the second (or any further) binding domain(s) of the antibody construct of the invention is/are preferably cross-species specific for members of the mammalian order of primates. Cross-species specific CD3 binding domains are, for example, described in WO 2008/119567. According to one embodiment, the first and/or second binding domain, in addition to binding to human target cell surface antigen and human CD3, respectively, will also bind to target cell surface antigen/CD3 of primates including (but not limited to) new world primates (such as Callithrix jacchus, Saguinus Oedipus or Saimiri sciureus), old world primates (such baboons and macaques), gibbons, and non-human homininae.

[0102] In one embodiment of the antibody construct of the invention the first domain binds to human target cell surface antigen and further binds to macaque target cell surface antigen, such as target cell surface antigen of Macaca fascicularis, and more preferably, to macaque target cell surface antigen expressed on the surface macaque cells. The affinity of the first binding domain for macaque target cell surface antigen is preferably ≦15 nM, more preferably ≦10 nM, even more preferably ≦5 nM, even more preferably ≦1 nM, even more preferably ≦0.5 nM, even more preferably ≦0.1 nM, and most preferably ≦0.05 nM or even ≦0.01 nM.

[0103] Preferably the affinity gap of the antibody constructs according to the invention for binding macaque target cell surface antigen versus human target cell surface antigen [ma target cell surface antigen:hu target cell surface antigen] (as determined e.g. by BiaCore or by Scatchard analysis) is <100, preferably <20, more preferably <15, further preferably <10, even more preferably <8, more preferably <6 and most preferably <2. Preferred ranges for the affinity gap of the antibody constructs according to the invention for binding macaque target cell surface antigen versus human target cell surface antigen are between 0.1 and 20, more preferably between 0.2 and 10, even more preferably between 0.3 and 6, even more preferably between 0.5 and 3 or between 0.5 and 2.5, and most preferably between 0.5 and 2 or between 0.6 and 2.

[0104] The second (binding) domain of the antibody construct of the invention binds to human CD3 epsilon and/or to Macaca CD3 epsilon. In a preferred embodiment the second domain further bind to Callithrix jacchus, Saguinus Oedipus or Saimiri sciureus CD3 epsilon. Callithrix jacchus and Saguinus oedipus are both new world primate belonging to the family of Callitrichidae, while Saimiri sciureus is a new world primate belonging to the family of Cebidae.

[0105] It is preferred for the antibody construct of the present invention that the second domain which binds to an extracellular epitope of the human and/or the Macaca CD3 on the comprises a VL region comprising CDR-L1, CDR-L2 and CDR-L3 selected from:

(a) CDR-L1 as depicted in SEQ ID NO: 27 of WO 2008/119567, CDR-L2 as depicted in SEQ ID NO: 28 of WO 2008/119567 and CDR-L3 as depicted in SEQ ID NO: 29 of WO 2008/119567;
(b) CDR-L1 as depicted in SEQ ID NO: 117 of WO 2008/119567, CDR-L2 as depicted in SEQ ID NO: 118 of WO 2008/119567 and CDR-L3 as depicted in SEQ ID NO: 119 of WO 2008/119567; and
(c) CDR-L1 as depicted in SEQ ID NO: 153 of WO 2008/119567, CDR-L2 as depicted in SEQ ID NO: 154 of WO 2008/119567 and CDR-L3 as depicted in SEQ ID NO: 155 of WO 2008/119567.

[0106] In an also preferred embodiment of the antibody construct of the present invention, the second domain which binds to an extracellular epitope of the human and/or the Macaca CD3 epsilon chain comprises a VH region comprising CDR-H 1, CDR-H2 and CDR-H3 selected from:

(a) CDR-H1 as depicted in SEQ ID NO: 12 of WO 2008/119567, CDR-H2 as depicted in SEQ ID NO: 13 of WO 2008/119567 and CDR-H3 as depicted in SEQ ID NO: 14 of WO 2008/119567;
(b) CDR-H1 as depicted in SEQ ID NO: 30 of WO 2008/119567, CDR-H2 as depicted in SEQ ID NO: 31 of WO 2008/119567 and CDR-H3 as depicted in SEQ ID NO: 32 of WO 2008/119567;
(c) CDR-H1 as depicted in SEQ ID NO: 48 of WO 2008/119567, CDR-H2 as depicted in SEQ ID NO: 49 of WO 2008/119567 and CDR-H3 as depicted in SEQ ID NO: 50 of WO 2008/119567;
(d) CDR-H1 as depicted in SEQ ID NO: 66 of WO 2008/119567, CDR-H2 as depicted in SEQ ID NO: 67 of WO 2008/119567 and CDR-H3 as depicted in SEQ ID NO: 68 of WO 2008/119567;
(e) CDR-H1 as depicted in SEQ ID NO: 84 of WO 2008/119567, CDR-H2 as depicted in SEQ ID NO: 85 of WO 2008/119567 and CDR-H3 as depicted in SEQ ID NO: 86 of WO 2008/119567;
(f) CDR-H1 as depicted in SEQ ID NO: 102 of WO 2008/119567, CDR-H2 as depicted in SEQ ID NO: 103 of WO 2008/119567 and CDR-H3 as depicted in SEQ ID NO: 104 of WO 2008/119567;
(g) CDR-H1 as depicted in SEQ ID NO: 120 of WO 2008/119567, CDR-H2 as depicted in SEQ ID NO: 121 of WO 2008/119567 and CDR-H3 as depicted in SEQ ID NO: 122 of WO 2008/119567;
(h) CDR-H1 as depicted in SEQ ID NO: 138 of WO 2008/119567, CDR-H2 as depicted in SEQ ID NO: 139 of WO 2008/119567 and CDR-H3 as depicted in SEQ ID NO: 140 of WO 2008/119567;
(i) CDR-H1 as depicted in SEQ ID NO: 156 of WO 2008/119567, CDR-H2 as depicted in SEQ ID NO: 157 of WO 2008/119567 and CDR-H3 as depicted in SEQ ID NO: 158 of WO 2008/119567; and
(j) CDR-H1 as depicted in SEQ ID NO: 174 of WO 2008/119567, CDR-H2 as depicted in SEQ ID NO: 175 of WO 2008/119567 and CDR-H3 as depicted in SEQ ID NO: 176 of WO 2008/119567.

[0107] In a preferred embodiment of the antibody construct of the invention the above described three groups of VL CDRs are combined with the above described ten groups of VH CDRs within the second binding domain to form (30) groups, each comprising CDR-L 1-3 and CDR-H 1-3.

[0108] It is preferred for the antibody construct of the present invention that the second domain which binds to CD3 comprises a VL region selected from the group consisting of a VL region as depicted in SEQ ID NO: 17, 21, 35, 39, 53, 57, 71, 75, 89, 93, 107, 111, 125, 129, 143, 147, 161, 165, 179 or 183 of WO 2008/119567 or as depicted in SEQ ID NO: 13.

[0109] It is also preferred that the second domain which binds to CD3 comprises a VH region selected from the group consisting of a VH region as depicted in SEQ ID NO: 15, 19, 33, 37, 51, 55, 69, 73, 87, 91, 105, 109, 123, 127, 141, 145, 159, 163, 177 or 181 of WO 2008/119567 or as depicted in SEQ ID NO: 14.

[0110] More preferably, the antibody construct of the present invention is characterized by a second domain which binds to CD3 comprising a VL region and a VH region selected from the group consisting of:

(a) a VL region as depicted in SEQ ID NO: 17 or 21 of WO 2008/119567 and a VH region as depicted in SEQ ID NO: 15 or 19 of WO 2008/119567;
(b) a VL region as depicted in SEQ ID NO: 35 or 39 of WO 2008/119567 and a VH region as depicted in SEQ ID NO: 33 or 37 of WO 2008/119567;
(c) a VL region as depicted in SEQ ID NO: 53 or 57 of WO 2008/119567 and a VH region as depicted in SEQ ID NO: 51 or 55 of WO 2008/119567;
(d) a VL region as depicted in SEQ ID NO: 71 or 75 of WO 2008/119567 and a VH region as depicted in SEQ ID NO: 69 or 73 of WO 2008/119567;
(e) a VL region as depicted in SEQ ID NO: 89 or 93 of WO 2008/119567 and a VH region as depicted in SEQ ID NO: 87 or 91 of WO 2008/119567;
(f) a VL region as depicted in SEQ ID NO: 107 or 111 of WO 2008/119567 and a VH region as depicted in SEQ ID NO: 105 or 109 of WO 2008/119567;
(g) a VL region as depicted in SEQ ID NO: 125 or 129 of WO 2008/119567 and a VH region as depicted in SEQ ID NO: 123 or 127 of WO 2008/119567;
(h) a VL region as depicted in SEQ ID NO: 143 or 147 of WO 2008/119567 and a VH region as depicted in SEQ ID NO: 141 or 145 of WO 2008/119567;
(i) a VL region as depicted in SEQ ID NO: 161 or 165 of WO 2008/119567 and a VH region as depicted in SEQ ID NO: 159 or 163 of WO 2008/119567; and
(j) a VL region as depicted in SEQ ID NO: 179 or 183 of WO 2008/119567 and a VH region as depicted in SEQ ID NO: 177 or 181 of WO 2008/119567.

[0111] Also preferred in connection with the antibody construct of the present invention is a second domain which binds to CD3 comprising a VL region as depicted in SEQ ID NO: 13 and a VH region as depicted in SEQ ID NO: 14.

[0112] According to a preferred embodiment of the antibody construct of the present invention, the first and/or the second domain have the following format: The pairs of VH regions and VL regions are in the format of a single chain antibody (scFv). The VH and VL regions are arranged in the order VH-VL or VL-VH. It is preferred that the VH-region is positioned N-terminally of a linker sequence, and the VL-region is positioned C-terminally of the linker sequence.

[0113] A preferred embodiment of the above described antibody construct of the present invention is characterized by the second domain which binds to CD3 comprising an amino acid sequence selected from the group consisting of SEQ ID NOs: 23, 25, 41, 43, 59, 61, 77, 79, 95, 97, 113, 115, 131, 133, 149, 151, 167, 169, 185 or 187 of WO 2008/119567 or depicted in SEQ ID NO: 15.

[0114] Covalent modifications of the antibody constructs are also included within the scope of this invention, and are generally, but not always, done post-translationally. For example, several types of covalent modifications of the antibody construct are introduced into the molecule by reacting specific amino acid residues of the antibody construct with an organic derivatizing agent that is capable of reacting with selected side chains or the N- or C-terminal residues.

[0115] Cysteinyl residues most commonly are reacted with α-haloacetates (and corresponding amines), such as chloroacetic acid or chloroacetamide, to give carboxymethyl or carboxyamidomethyl derivatives. Cysteinyl residues also are derivatized by reaction with bromotrifluoroacetone, α-bromo-β-(5-imidozoyl)propionic acid, chloroacetyl phosphate, N-alkylmaleimides, 3-nitro-2-pyridyl disulfide, methyl 2-pyridyl disulfide, p-chloromercuribenzoate, 2-chloromercuri-4-nitrophenol, or chloro-7-nitrobenzo-2-oxa-1,3-diazole.

[0116] Histidyl residues are derivatized by reaction with diethylpyrocarbonate at pH 5.5-7.0 because this agent is relatively specific for the histidyl side chain. Para-bromophenacyl bromide also is useful; the reaction is preferably performed in 0.1 M sodium cacodylate at pH 6.0. Lysinyl and amino terminal residues are reacted with succinic or other carboxylic acid anhydrides. Derivatization with these agents has the effect of reversing the charge of the lysinyl residues. Other suitable reagents for derivatizing alpha-amino-containing residues include imidoesters such as methyl picolinimidate; pyridoxal phosphate; pyridoxal; chloroborohydride; trinitrobenzenesulfonic acid; O-methylisourea; 2,4-pentanedione; and transaminase-catalyzed reaction with glyoxylate.

[0117] Arginyl residues are modified by reaction with one or several conventional reagents, among them phenylglyoxal, 2,3-butanedione, 1,2-cyclohexanedione, and ninhydrin. Derivatization of arginine residues requires that the reaction be performed in alkaline conditions because of the high pKa of the guanidine functional group. Furthermore, these reagents may react with the groups of lysine as well as the arginine epsilon-amino group.

[0118] The specific modification of tyrosyl residues may be made, with particular interest in introducing spectral labels into tyrosyl residues by reaction with aromatic diazonium compounds or tetranitromethane. Most commonly, N-acetylimidizole and tetranitromethane are used to form O-acetyl tyrosyl species and 3-nitro derivatives, respectively. Tyrosyl residues are iodinated using ¹²⁵I or ¹³¹I to prepare labeled proteins for use in radioimmunoassay, the chloramine T method described above being suitable.

[0119] Carboxyl side groups (aspartyl or glutamyl) are selectively modified by reaction with carbodiimides (R′—N═C═N—R′), where R and R′ are optionally different alkyl groups, such as 1-cyclohexyl-3-(2-morpholinyl-4-ethyl) carbodiimide or 1-ethyl-3-(4-azonia-4,4-dimethylpentyl) carbodiimide. Furthermore, aspartyl and glutamyl residues are converted to asparaginyl and glutaminyl residues by reaction with ammonium ions.

[0120] Derivatization with bifunctional agents is useful for crosslinking the antibody constructs of the present invention to a water-insoluble support matrix or surface for use in a variety of methods. Commonly used crosslinking agents include, e.g., 1,1-bis(diazoacetyl)-2-phenylethane, glutaraldehyde, N-hydroxysuccinimide esters, for example, esters with 4-azidosalicylic acid, homobifunctional imidoesters, including disuccinimidyl esters such as 3,3′-dithiobis(succinimidylpropionate), and bifunctional maleimides such as bis-N-maleimido-1,8-octane. Derivatizing agents such as methyl-3-[(p-azidophenyl)dithio]propioimidate yield photoactivatable intermediates that are capable of forming crosslinks in the presence of light. Alternatively, reactive water-insoluble matrices such as cyanogen bromide-activated carbohydrates and the reactive substrates as described in U.S. Pat. Nos. 3,969,287; 3,691,016; 4,195,128; 4,247,642; 4,229,537; and 4,330,440 are employed for protein immobilization.

[0121] Glutaminyl and asparaginyl residues are frequently deamidated to the corresponding glutamyl and aspartyl residues, respectively. Alternatively, these residues are deamidated under mildly acidic conditions. Either form of these residues falls within the scope of this invention.

[0122] Other modifications include hydroxylation of proline and lysine, phosphorylation of hydroxyl groups of seryl or threonyl residues, methylation of the α-amino groups of lysine, arginine, and histidine side chains (T. E. Creighton, Proteins: Structure and Molecular Properties, W. H. Freeman & Co., San Francisco, 1983, pp. 79-86), acetylation of the N-terminal amine, and amidation of any C-terminal carboxyl group.

[0123] Another type of covalent modification of the antibody constructs included within the scope of this invention comprises altering the glycosylation pattern of the protein. As is known in the art, glycosylation patterns can depend on both the sequence of the protein (e.g., the presence or absence of particular glycosylation amino acid residues, discussed below), or the host cell or organism in which the protein is produced. Particular expression systems are discussed below.

[0124] Glycosylation of polypeptides is typically either N-linked or O-linked. N-linked refers to the attachment of the carbohydrate moiety to the side chain of an asparagine residue. The tri-peptide sequences asparagine-X-serine and asparagine-X-threonine, where X is any amino acid except proline, are the recognition sequences for enzymatic attachment of the carbohydrate moiety to the asparagine side chain. Thus, the presence of either of these tri-peptide sequences in a polypeptide creates a potential glycosylation site. O-linked glycosylation refers to the attachment of one of the sugars N-acetylgalactosamine, galactose, or xylose, to a hydroxyamino acid, most commonly serine or threonine, although 5-hydroxyproline or 5-hydroxylysine may also be used.

[0125] Addition of glycosylation sites to the antibody construct is conveniently accomplished by altering the amino acid sequence such that it contains one or more of the above-described tri-peptide sequences (for N-linked glycosylation sites). The alteration may also be made by the addition of, or substitution by, one or more serine or threonine residues to the starting sequence (for O-linked glycosylation sites). For ease, the amino acid sequence of an antibody construct is preferably altered through changes at the DNA level, particularly by mutating the DNA encoding the polypeptide at preselected bases such that codons are generated that will translate into the desired amino acids.

[0126] Another means of increasing the number of carbohydrate moieties on the antibody construct is by chemical or enzymatic coupling of glycosides to the protein. These procedures are advantageous in that they do not require production of the protein in a host cell that has glycosylation capabilities for N- and O-linked glycosylation. Depending on the coupling mode used, the sugar(s) may be attached to (a) arginine and histidine, (b) free carboxyl groups, (c) free sulfhydryl groups such as those of cysteine, (d) free hydroxyl groups such as those of serine, threonine, or hydroxyproline, (e) aromatic residues such as those of phenylalanine, tyrosine, or tryptophan, or (f) the amide group of glutamine. These methods are described in WO 87/05330, and in Aplin and Wriston, 1981, CRC Crit. Rev. Biochem., pp. 259-306.

[0127] Removal of carbohydrate moieties present on the starting antibody construct may be accomplished chemically or enzymatically. Chemical deglycosylation requires exposure of the protein to the compound trifluoromethanesulfonic acid, or an equivalent compound. This treatment results in the cleavage of most or all sugars except the linking sugar (N-acetylglucosamine or N-acetylgalactosamine), while leaving the polypeptide intact. Chemical deglycosylation is described by Hakimuddin et al., 1987, Arch. Biochem. Biophys. 259:52 and by Edge et al., 1981, Anal. Biochem. 118:131. Enzymatic cleavage of carbohydrate moieties on polypeptides can be achieved by the use of a variety of endo- and exo-glycosidases as described by Thotakura et al., 1987, Meth. Enzymol. 138:350. Glycosylation at potential glycosylation sites may be prevented by the use of the compound tunicamycin as described by Duskin et al., 1982, J. Biol. Chem. 257:3105. Tunicamycin blocks the formation of protein-N-glycoside linkages.

[0128] Other modifications of the antibody construct are also contemplated herein. For example, another type of covalent modification of the antibody construct comprises linking the antibody construct to various non-proteinaceous polymers, including, but not limited to, various polyols such as polyethylene glycol, polypropylene glycol, polyoxyalkylenes, or copolymers of polyethylene glycol and polypropylene glycol, in the manner set forth in U.S. Pat. Nos. 4,640,835; 4,496,689; 4,301,144; 4,670,417; 4,791,192 or 4,179,337. In addition, as is known in the art, amino acid substitutions may be made in various positions within the antibody construct, e.g. in order to facilitate the addition of polymers such as PEG.

[0129] In some embodiments, the covalent modification of the antibody constructs of the invention comprises the addition of one or more labels. The labelling group may be coupled to the antibody construct via spacer arms of various lengths to reduce potential steric hindrance. Various methods for labelling proteins are known in the art and can be used in performing the present invention. The term “label” or “labelling group” refers to any detectable label. In general, labels fall into a variety of classes, depending on the assay in which they are to be detected—the following examples include, but are not limited to:
[0130] a) isotopic labels, which may be radioactive or heavy isotopes, such as radioisotopes or radionuclides (e.g., ³H, ¹⁴C, ¹⁵N, ³⁵S, ⁸⁹Zr, ⁹⁰Y, ⁹⁹Tc, ¹¹¹In, ¹²⁵I, ¹³¹I)
[0131] b) magnetic labels (e.g., magnetic particles)
[0132] c) redox active moieties
[0133] d) optical dyes (including, but not limited to, chromophores, phosphors and fluorophores) such as fluorescent groups (e.g., FITC, rhodamine, lanthanide phosphors), chemiluminescent groups, and fluorophores which can be either “small molecule” fluores or proteinaceous fluores
[0134] e) enzymatic groups (e.g. horseradish peroxidase, β-galactosidase, luciferase, alkaline phosphatase)
[0135] f) biotinylated groups
[0136] g) predetermined polypeptide epitopes recognized by a secondary reporter (e.g., leucine zipper pair sequences, binding sides for secondary antibodies, metal binding domains, epitope tags, etc.)

[0137] By “fluorescent label” is meant any molecule that may be detected via its inherent fluorescent properties. Suitable fluorescent labels include, but are not limited to, fluorescein, rhodamine, tetramethylrhodamine, eosin, erythrosin, coumarin, methyl-coumarins, pyrene, Malacite green, stilbene, Lucifer Yellow, Cascade BlueJ, Texas Red, IAEDANS, EDANS, BODIPY FL, LC Red 640, Cy 5, Cy 5.5, LC Red 705, Oregon green, the Alexa-Fluor dyes (Alexa Fluor 350, Alexa Fluor 430, Alexa Fluor 488, Alexa Fluor 546, Alexa Fluor 568, Alexa Fluor 594, Alexa Fluor 633, Alexa Fluor 660, Alexa Fluor 680), Cascade Blue, Cascade Yellow and R-phycoerythrin (PE) (Molecular Probes, Eugene, Oreg.), FITC, Rhodamine, and Texas Red (Pierce, Rockford, Ill.), Cy5, Cy5.5, Cy7 (Amersham Life Science, Pittsburgh, Pa.). Suitable optical dyes, including fluorophores, are described in Molecular Probes Handbook by Richard P. Haugland.

[0138] Suitable proteinaceous fluorescent labels also include, but are not limited to, green fluorescent protein, including a Renilla, Ptilosarcus, or Aequorea species of GFP (Chalfie et al., 1994, Science 263:802-805), EGFP (Clontech Laboratories, Inc., Genbank Accession Number U55762), blue fluorescent protein (BFP, Quantum Biotechnologies, Inc. 1801 de Maisonneuve Blvd. West, 8th Floor, Montreal, Quebec, Canada H3H 1J9; Stauber, 1998, Biotechniques 24:462-471; Heim et al., 1996, Curr. Biol. 6:178-182), enhanced yellow fluorescent protein (EYFP, Clontech Laboratories, Inc.), luciferase (Ichiki et al., 1993, J. Immunol. 150:5408-5417), 3 galactosidase (Nolan et al., 1988, Proc. Natl. Acad. Sci. U.S.A. 85:2603-2607) and Renilla (WO92/15673, WO95/07463, WO98/14605, WO98/26277, WO99/49019, U.S. Pat. Nos. 5,292,658; 5,418,155; 5,683,888; 5,741,668; 5,777,079; 5,804,387; 5,874,304; 5,876,995; 5,925,558).

[0139] The antibody construct of the invention may also comprise additional domains, which are e.g. helpful in the isolation of the molecule or relate to an adapted pharmacokinetic profile of the molecule. Domains helpful for the isolation of an antibody construct may be selected from peptide motives or secondarily introduced moieties, which can be captured in an isolation method, e.g. an isolation column. Non-limiting embodiments of such additional domains comprise peptide motives known as Myc-tag, HAT-tag, HA-tag, TAP-tag, GST-tag, chitin binding domain (CBD-tag), maltose binding protein (MBP-tag), Flag-tag, Strep-tag and variants thereof (e.g. StrepII-tag) and His-tag. All herein disclosed antibody constructs characterized by the identified CDRs may comprise a His-tag domain, which is generally known as a repeat of consecutive His residues in the amino acid sequence of a molecule, preferably of five, and more preferably of six His residues (hexa-histidine). The His-tag may be located e.g. at the N- or C-terminus of the antibody construct, preferably it is located at the C-terminus. Most preferably, a hexa-histidine tag (HHHHHH) (SEQ ID NO:16) is linked via peptide bond to the C-terminus of the antibody construct according to the invention. Additionally, a conjugate system of PLGA-PEG-PLGA may be combined with a poly-histidine tag for sustained release application and improved pharmacokinetic profile.

[0140] Amino acid sequence modifications of the antibody constructs described herein are also contemplated. For example, it may be desirable to improve the binding affinity and/or other biological properties of the antibody construct. Amino acid sequence variants of the antibody constructs are prepared by introducing appropriate nucleotide changes into the antibody constructs nucleic acid, or by peptide synthesis. All of the below described amino acd sequence modifications should result in an antibody construct which still retains the desired biological activity (binding to the target cell surface antigen and to CD3) of the unmodified parental molecule.

[0141] The term “amino acid” or “amino acid residue” typically refers to an amino acid having its art recognized definition such as an amino acid selected from the group consisting of: alanine (Ala or A); arginine (Arg or R); asparagine (Asn or N); aspartic acid (Asp or D); cysteine (Cys or C); glutamine (Gln or Q); glutamic acid (Glu or E); glycine (Gly or G); histidine (His or H); isoleucine (He or I): leucine (Leu or L); lysine (Lys or K); methionine (Met or M); phenylalanine (Phe or F); pro line (Pro or P); serine (Ser or S); threonine (Thr or T); tryptophan (Trp or W); tyrosine (Tyr or Y); and valine (Val or V), although modified, synthetic, or rare amino acids may be used as desired. Generally, amino acids can be grouped as having a nonpolar side chain (e.g., Ala, Cys, He, Leu, Met, Phe, Pro, Val); a negatively charged side chain (e.g., Asp, Glu); a positively charged sidechain (e.g., Arg, His, Lys); or an uncharged polar side chain (e.g., Asn, Cys, Gin, Gly, His, Met, Phe, Ser, Thr, Trp, and Tyr).

[0142] Amino acid modifications include, for example, deletions from, and/or insertions into, and/or substitutions of, residues within the amino acid sequences of the antibody constructs. Any combination of deletion, insertion, and substitution is made to arrive at the final construct, provided that the final construct possesses the desired characteristics. The amino acid changes also may alter post-translational processes of the antibody constructs, such as changing the number or position of glycosylation sites.

[0143] For example, 1, 2, 3, 4, 5, or 6 amino acids may be inserted, substituted or deleted in each of the CDRs (of course, dependent on their length), while 1, 2, 3, 4, 5, 6, 7, 8, 9, 10, 11, 12, 13, 14, 15, 16, 17, 18, 19, 20, or 25 amino acids may be inserted, substituted or deleted in each of the FRs. Preferably, amino acid sequence insertions into the antibody construct include amino- and/or carboxyl-terminal fusions ranging in length from 1, 2, 3, 4, 5, 6, 7, 8, 9 or 10 residues to polypeptides containing a hundred or more residues, as well as intra-sequence insertions of single or multiple amino acid residues. Corresponding modifications may also performed within the third domain of the antibody construct of the invention. An insertional variant of the antibody construct of the invention includes the fusion to the N-terminus or to the C-terminus of the antibody construct of an enzyme or the fusion to a polypeptide.

[0144] The sites of greatest interest for substitutional mutagenesis include (but are not limited to) the CDRs of the heavy and/or light chain, in particular the hypervariable regions, but FR alterations in the heavy and/or light chain are also contemplated. The substitutions are preferably conservative substitutions as described herein. Preferably, 1, 2, 3, 4, 5, 6, 7, 8, 9, or 10 amino acids may be substituted in a CDR, while 1, 2, 3, 4, 5, 6, 7, 8, 9, 10, 11, 12, 13, 14, 15, 16, 17, 18, 19, 20, or 25 amino acids may be substituted in the framework regions (FRs), depending on the length of the CDR or FR. For example, if a CDR sequence encompasses 6 amino acids, it is envisaged that one, two or three of these amino acids are substituted. Similarly, if a CDR sequence encompasses 15 amino acids it is envisaged that one, two, three, four, five or six of these amino acids are substituted.

[0145] A useful method for identification of certain residues or regions of the antibody constructs that are preferred locations for mutagenesis is called “alanine scanning mutagenesis” as described by Cunningham and Wells in Science, 244: 1081-1085 (1989). Here, a residue or group of target residues within the antibody construct is/are identified (e.g. charged residues such as arg, asp, his, lys, and glu) and replaced by a neutral or negatively charged amino acid (most preferably alanine or polyalanine) to affect the interaction of the amino acids with the epitope.

[0146] Those amino acid locations demonstrating functional sensitivity to the substitutions are then refined by introducing further or other variants at, or for, the sites of substitution. Thus, while the site or region for introducing an amino acid sequence variation is predetermined, the nature of the mutation per se needs not to be predetermined. For example, to analyze or optimize the performance of a mutation at a given site, alanine scanning or random mutagenesis may be conducted at a target codon or region, and the expressed antibody construct variants are screened for the optimal combination of desired activity. Techniques for making substitution mutations at predetermined sites in the DNA having a known sequence are well known, for example, M13 primer mutagenesis and PCR mutagenesis. Screening of the mutants is done using assays of antigen binding activities, such as the target cell surface antigen or CD3 binding.

[0147] Generally, if amino acids are substituted in one or more or all of the CDRs of the heavy and/or light chain, it is preferred that the then-obtained “substituted” sequence is at least 60% or 65%, more preferably 70% or 75%, even more preferably 80% or 85%, and particularly preferably 90% or 95% identical to the “original” CDR sequence. This means that it is dependent of the length of the CDR to which degree it is identical to the “substituted” sequence. For example, a CDR having 5 amino acids is preferably 80% identical to its substituted sequence in order to have at least one amino acid substituted. Accordingly, the CDRs of the antibody construct may have different degrees of identity to their substituted sequences, e.g., CDRL1 may have 80%, while CDRL3 may have 90%.

[0148] Preferred substitutions (or replacements) are conservative substitutions. However, any substitution (including non-conservative substitution or one or more from the “exemplary substitutions” listed in Table 3, below) is envisaged as long as the antibody construct retains its capability to bind to the target cell surface antigen via the first domain and to CD3, respectively CD3 epsilon, via the second domain and/or its CDRs have an identity to the then substituted sequence (at least 60% or 65%, more preferably 70% or 75%, even more preferably 80% or 85%, and particularly preferably 90% or 95% identical to the “original” CDR sequence).

[0149] Conservative substitutions are shown in Table 3 under the heading of “preferred substitutions”. If such substitutions result in a change in biological activity, then more substantial changes, denominated “exemplary substitutions” in Table 3, or as further described below in reference to amino acid classes, may be introduced and the products screened for a desired characteristic.

TABLE 3
Amino acid substitutions

| | Exemplary | Preferred |
|---|---|---|
| Original | Substitutions | Substitutions |
| Ala (A) | val, leu, ile | val |
| Arg (R) | lys, gln, asn | lys |
| Asn (N) | gln, his, asp, lys, arg | gln |
| Asp (D) | glu, asn | glu |
| Cys (C) | ser, ala | ser |
| Gln (Q) | asn, glu | asn |
| Glu (E) | asp, gln | asp |
| Gly (G) | Ala | ala |
| His (H) | asn, gln, lys, arg | arg |
| Ile (I) | leu, val, met, ala, phe | leu |
| Leu (L) | norleucine, ile, val, met, ala | ile |
| Lys (K) | arg, gln, asn | arg |
| Met (M) | leu, phe, ile | leu |
| Phe (F) | leu, val, ile, ala, tyr | tyr |
| Pro (P) | Ala | ala |
| Ser (S) | Thr | thr |
| Thr (T) | Ser | ser |
| Trp (W) | tyr, phe | tyr |
| Tyr (Y) | trp, phe, thr, ser | phe |
| Val (V) | ile, leu, met, phe, ala | leu |

[0150] Substantial modifications in the biological properties of the antibody construct of the present invention are accomplished by selecting substitutions that differ significantly in their effect on maintaining (a) the structure of the polypeptide backbone in the area of the substitution, for example, as a sheet or helical conformation, (b) the charge or hydrophobicity of the molecule at the target site, or (c) the bulk of the side chain. Naturally occurring residues are divided into groups based on common side-chain properties: (1) hydrophobic: norleucine, met, ala, val, leu, ile; (2) neutral hydrophilic: cys, ser, thr, asn, gin; (3) acidic: asp, glu; (4) basic: his, lys, arg; (5) residues that influence chain orientation: gly, pro; and (6) aromatic: trp, tyr, phe.

[0151] Non-conservative substitutions will entail exchanging a member of one of these classes for another class. Any cysteine residue not involved in maintaining the proper conformation of the antibody construct may be substituted, generally with serine, to improve the oxidative stability of the molecule and prevent aberrant crosslinking. Conversely, cysteine bond(s) may be added to the antibody to improve its stability (particularly where the antibody is an antibody fragment such as an Fv fragment).

[0152] For amino acid sequences, sequence identity and/or similarity is determined by using standard techniques known in the art, including, but not limited to, the local sequence identity algorithm of Smith and Waterman, 1981, Adv. Appl. Math. 2:482, the sequence identity alignment algorithm of Needleman and Wunsch, 1970, J. Mol. Biol. 48:443, the search for similarity method of Pearson and Lipman, 1988, Proc. Nat. Acad. Sci. U.S.A. 85:2444, computerized implementations of these algorithms (GAP, BESTFIT, FASTA, and TFASTA in the Wisconsin Genetics Software Package, Genetics Computer Group, 575 Science Drive, Madison, Wis.), the Best Fit sequence program described by Devereux et al., 1984, Nucl. Acid Res. 12:387-395, preferably using the default settings, or by inspection. Preferably, percent identity is calculated by FastDB based upon the following parameters: mismatch penalty of 1; gap penalty of 1; gap size penalty of 0.33; and joining penalty of 30, “Current Methods in Sequence Comparison and Analysis,” Macromolecule Sequencing and Synthesis, Selected Methods and Applications, pp 127-149 (1988), Alan R. Liss, Inc.

[0153] An example of a useful algorithm is PILEUP. PILEUP creates a multiple sequence alignment from a group of related sequences using progressive, pairwise alignments. It can also plot a tree showing the clustering relationships used to create the alignment. PILEUP uses a simplification of the progressive alignment method of Feng & Doolittle, 1987, J. Mol. Evol. 35:351-360; the method is similar to that described by Higgins and Sharp, 1989, CABIOS 5:151-153. Useful PILEUP parameters including a default gap weight of 3.00, a default gap length weight of 0.10, and weighted end gaps.

[0154] Another example of a useful algorithm is the BLAST algorithm, described in: Altschul et al., 1990, J. Mol. Biol. 215:403-410; Altschul et al., 1997, Nucleic Acids Res. 25:3389-3402; and Karin et al., 1993, Proc. Natl. Acad. Sci. U.S.A. 90:5873-5787. A particularly useful BLAST program is the WU-BLAST-2 program which was obtained from Altschul et al., 1996, Methods in Enzymology 266:460-480. WU-BLAST-2 uses several search parameters, most of which are set to the default values. The adjustable parameters are set with the following values: overlap span=1, overlap fraction=0.125, word threshold (T)=II. The HSP S and HSP S2 parameters are dynamic values and are established by the program itself depending upon the composition of the particular sequence and composition of the particular database against which the sequence of interest is being searched; however, the values may be adjusted to increase sensitivity.

[0155] An additional useful algorithm is gapped BLAST as reported by Altschul et al., 1993, Nucl. Acids Res. 25:3389-3402. Gapped BLAST uses BLOSUM-62 substitution scores; threshold T parameter set to 9; the two-hit method to trigger ungapped extensions, charges gap lengths of k a cost of 10+k; Xu set to 16, and Xg set to 40 for database search stage and to 67 for the output stage of the algorithms. Gapped alignments are triggered by a score corresponding to about 22 bits.

[0156] Generally, the amino acid homology, similarity, or identity between individual variant CDRs or VH/VL sequences are at least 60% to the sequences depicted herein, and more typically with preferably increasing homologies or identities of at least 65% or 70%, more preferably at least 75% or 80%, even more preferably at least 85%, 90%, 91%, 92%, 93%, 94%, 95%, 96%, 97%, 98%, 99%, and almost 100%. In a similar manner, “percent (%) nucleic acid sequence identity” with respect to the nucleic acid sequence of the binding proteins identified herein is defined as the percentage of nucleotide residues in a candidate sequence that are identical with the nucleotide residues in the coding sequence of the antibody construct. A specific method utilizes the BLASTN module of WU-BLAST-2 set to the default parameters, with overlap span and overlap fraction set to 1 and 0.125, respectively.

[0157] Generally, the nucleic acid sequence homology, similarity, or identity between the nucleotide sequences encoding individual variant CDRs or VH/VL sequences and the nucleotide sequences depicted herein are at least 60%, and more typically with preferably increasing homologies or identities of at least 65%, 70%, 75%, 80%, 81%, 82%, 83%, 84%, 85%, 86%, 87%, 88%, 89%, 90%, 91%, 92%, 93%, 94%, 95%, 96%, 97%, 98%, or 99%, and almost 100%. Thus, a “variant CDR” or a “variant VH/VL region” is one with the specified homology, similarity, or identity to the parent CDR/VH/VL of the invention, and shares biological function, including, but not limited to, at least 60%, 65%, 70%, 75%, 80%, 81%, 82%, 83%, 84%, 85%, 86%, 87%, 88%, 89%, 90%, 91%, 92%, 93%, 94%, 95%, 96%, 97%, 98%, or 99% of the specificity and/or activity of the parent CDR or VH/VL.

[0158] In one embodiment, the percentage of identity to human germline of the antibody constructs according to the invention is ≧70% or ≧75%, more preferably ≧80% or ≧85%, even more preferably ≧90%, and most preferably ≧91%, ≧92%, ≧93%, ≧94%, ≧95% or even ≧96%. Identity to human antibody germline gene products is thought to be an important feature to reduce the risk of therapeutic proteins to elicit an immune response against the drug in the patient during treatment. Hwang & Foote (“Immunogenicity of engineered antibodies”; Methods 36 (2005) 3-10) demonstrate that the reduction of non-human portions of drug antibody constructs leads to a decrease of risk to induce anti-drug antibodies in the patients during treatment. By comparing an exhaustive number of clinically evaluated antibody drugs and the respective immunogenicity data, the trend is shown that humanization of the V-regions of antibodies makes the protein less immunogenic (average 5.1% of patients) than antibodies carrying unaltered non-human V regions (average 23.59% of patients). A higher degree of identity to human sequences is hence desirable for V-region based protein therapeutics in the form of antibody constructs. For this purpose of determining the germline identity, the V-regions of VL can be aligned with the amino acid sequences of human germline V segments and J segments (http://vbase.mrc-cpe.cam.ac.uk/) using Vector NTI software and the amino acid sequence calculated by dividing the identical amino acid residues by the total number of amino acid residues of the VL in percent. The same can be for the VH segments (http://vbase.mrc-cpe.cam.ac.uk/) with the exception that the VH CDR3 may be excluded due to its high diversity and a lack of existing human germline VH CDR3 alignment partners. Recombinant techniques can then be used to increase sequence identity to human antibody germline genes.

[0159] In a further embodiment, the bispecific antibody constructs of the present invention exhibit high monomer yields under standard research scale conditions, e.g., in a standard two-step purification process. Preferably the monomer yield of the antibody constructs according to the invention is ≧0.25 mg/L supernatant, more preferably ≧0.5 mg/L, even more preferably ≧1 mg/L, and most preferably ≧3 mg/L supernatant.

[0160] Likewise, the yield of the dimeric antibody construct isoforms and hence the monomer percentage (i.e., monomer:(monomer+dimer)) of the antibody constructs can be determined. The productivity of monomeric and dimeric antibody constructs and the calculated monomer percentage can e.g. be obtained in the SEC purification step of culture supernatant from standardized research-scale production in roller bottles. In one embodiment, the monomer percentage of the antibody constructs is ≧80%, more preferably ≧85%, even more preferably ≧90%, and most preferably ≧95%.

[0161] In one embodiment, the antibody constructs have a preferred plasma stability (ratio of EC50 with plasma to EC50 w/o plasma) of ≦5 or ≦4, more preferably ≦3.5 or ≦3, even more preferably ≦2.5 or ≦2, and most preferably ≦1.5 or ≦1. The plasma stability of an antibody construct can be tested by incubation of the construct in human plasma at 37° C. for 24 hours followed by EC50 determination in a ⁵¹chromium release cytotoxicity assay. The effector cells in the cytotoxicity assay can be stimulated enriched human CD8 positive T cells. Target cells can e.g. be CHO cells transfected with the human target cell surface antigen. The effector to target cell (E:T) ratio can be chosen as 10:1. The human plasma pool used for this purpose is derived from the blood of healthy donors collected by EDTA coated syringes. Cellular components are removed by centrifugation and the upper plasma phase is collected and subsequently pooled. As control, antibody constructs are diluted immediately prior to the cytotoxicity assay in RPMI-1640 medium. The plasma stability is calculated as ratio of EC50 (after plasma incubation) to EC50 (control).

[0162] It is furthermore preferred that the monomer to dimer conversion of antibody constructs of the invention is low. The conversion can be measured under different conditions and analyzed by high performance size exclusion chromatography. For example, incubation of the monomeric isoforms of the antibody constructs can be carried out for 7 days at 37° C. and concentrations of e.g. 100 μg/ml or 250 μg/ml in an incubator. Under these conditions, it is preferred that the antibody constructs of the invention show a dimer percentage that is ≦5%, more preferably ≦4%, even more preferably ≦3%, even more preferably ≦2.5%, even more preferably ≦2%, even more preferably ≦1.5%, and most preferably ≦1% or 50.5% or even 0%.

[0163] It is also preferred that the bispecific antibody constructs of the present invention present with very low dimer conversion after a number of freeze/thaw cycles. For example, the antibody construct monomer is adjusted to a concentration of 250 μg/ml e.g. in generic formulation buffer and subjected to three freeze/thaw cycles (freezing at −80° C. for 30 min followed by thawing for 30 min at room temperature), followed by high performance SEC to determine the percentage of initially monomeric antibody construct, which had been converted into dimeric antibody construct. Preferably the dimer percentages of the bispecific antibody constructs are ≦55%, more preferably ≦54%, even more preferably ≦3%, even more preferably ≦2.5%, even more preferably ≦2%, even more preferably ≦1.5%, and most preferably ≦1% or even 50.5%, for example after three freeze/thaw cycles.

[0164] The bispecific antibody constructs of the present invention preferably show a favorable thermostability with aggregation temperatures ≧45° C. or ≧50° C., more preferably ≧52° C. or ≧54° C., even more preferably ≧56° C. or ≧57° C., and most preferably ≧58° C. or ≧59° C. The thermostability parameter can be determined in terms of antibody aggregation temperature as follows: Antibody solution at a concentration 250 μg/ml is transferred into a single use cuvette and placed in a Dynamic Light Scattering (DLS) device. The sample is heated from 40° C. to 70° C. at a heating rate of 0.5° C./min with constant acquisition of the measured radius. Increase of radius indicating melting of the protein and aggregation is used to calculate the aggregation temperature of the antibody.

[0165] Alternatively, temperature melting curves can be determined by Differential Scanning Calorimetry (DSC) to determine intrinsic biophysical protein stabilities of the antibody constructs. These experiments are performed using a MicroCal LLC (Northampton, Mass., U.S.A) VP-DSC device. The energy uptake of a sample containing an antibody construct is recorded from 20° C. to 90° C. compared to a sample containing only the formulation buffer. The antibody constructs are adjusted to a final concentration of 250 μg/ml e.g. in SEC running buffer. For recording of the respective melting curve, the overall sample temperature is increased stepwise. At each temperature T energy uptake of the sample and the formulation buffer reference is recorded. The difference in energy uptake Cp (kcal/mole/° C.) of the sample minus the reference is plotted against the respective temperature. The melting temperature is defined as the temperature at the first maximum of energy uptake.

[0166] The target cell surface antigenxCD3 bispecific antibody constructs of the invention are also envisaged to have a turbidity (as measured by OD340 after concentration of purified monomeric antibody construct to 2.5 mg/ml and over night incubation) of ≦0.2, preferably of ≦0.15, more preferably of ≦0.12, even more preferably of ≦0.1, and most preferably of ≦0.08.

[0167] In a further embodiment the antibody construct according to the invention is stable at physiologic or slightly lower pH, i.e., about pH 7.4 to 6.0. The more tolerant the antibody construct behaves at unphysiologic pH such as about pH 6.0, the higher is the recovery of the antibody construct eluted from an ion exchange column relative to the total amount of loaded protein. Recovery of the antibody construct from an ion (e.g., cation) exchange column at about pH 6.0 is preferably ≧30%, more preferably ≧40%, more preferably ≧50%, even more preferably ≧60%, even more preferably ≧70%, even more preferably ≧80%, even more preferably ≧90%, even more preferably ≧95%, and most preferably ≧99%.

[0168] It is furthermore envisaged that the bispecific antibody constructs of the present invention exhibit therapeutic efficacy or anti-tumor activity. This can e.g. be assessed in a study as disclosed in the following example of an advanced stage human tumor xenograft model:

[0169] The skilled person knows how to modify or adapt certain parameters of this study, such as the number of injected tumor cells, the site of injection, the number of transplanted human T cells, the amount of bispecific antibody constructs to be administered, and the timelines, while still arriving at a meaningful and reproducible result. Preferably, the tumor growth inhibition T/C [%] is ≦70 or ≦60, more preferably ≦50 or ≦40, even more preferably ≦30 or ≦20 and most preferably ≦10 or ≦5 or even ≦2.5.

[0170] In a preferred embodiment of the antibody construct of the invention the antibody construct is a single chain antibody construct.

[0171] Also in a preferred embodiment of the antibody construct of the invention said third domain comprises in an amino to carboxyl order:
[0172] hinge-CH2-CH3-linker-hinge-CH2-CH3.

[0173] In one embodiment of the invention each of said polypeptide monomers of the third domain has an amino acid sequence that is at least 90% identical to a sequence selected from the group consisting of: SEQ ID NO: 17-24. In a preferred embodiment or the invention each of said polypeptide monomers has an amino acid sequence selected from SEQ ID NO: 17-24.

[0174] Also in one embodiment of the invention the CH2 domain of one or preferably each (both) polypeptide monomers of the third domain comprises an intra domain cysteine disulfide bridge. As known in the art the term “cysteine disulfide bridge” refers to a functional group with the general structure R—S—S—R. The linkage is also called an SS-bond or a disulfide bridge and is derived by the coupling of two thiol groups of cysteine residues. It is particularly preferred for the antibody construct of the invention that the cysteines forming the cysteine disulfide bridge in the mature antibody construct are introduced into the amino acid sequence of the CH2 domain corresponding to 309 and 321 (Kabat numbering).

[0175] In one embodiment of the invention a glycosylation site in Kabat position 314 of the CH2 domain is removed. It is preferred that this removal of the glycosylation site is achieved by a N314X substitution, wherein X is any amino acid excluding Q. Said substitution is preferably a N314G substitution. In a more preferred embodiment, said CH2 domain additionally comprises the following substitutions (position according to Kabat) V321C and R309C (these substitutions introduce the intra domain cysteine disulfide bridge at Kabat positions 309 and 321).

[0176] It is assumed that the preferred features of the antibody construct of the invention compared e.g. to the bispecific heteroFc antibody construct known in the art (FIG. 1B) may be inter alia related to the introduction of the above described modifications in the CH2 domain. Thus, it is preferred for the construct of the invention that the CH2 domains in the third domain of the antibody construct of the invention comprise the intra domain cysteine disulfide bridge at Kabat positions 309 and 321 and/or the glycosylation site at Kabat position 314 is removed by a N314X substitution as above, preferably by a N314G substitution.

[0177] In a further preferred embodiment of the invention the CH2 domains in the third domain of the antibody construct of the invention comprise the intra domain cysteine disulfide bridge at Kabat positions 309 and 321 and the glycosylation site at Kabat position 314 is removed by a N314G substitution. Most preferably, the polypeptide monomer of the third domain of the antibody construct of the invention has an amino acid sequence selected from the group consisting of SEQ ID NO: 17 and 18.

[0178] In one embodiment the invention provides an antibody construct, wherein:
[0179] (i) the first domain comprises two antibody variable domains and the second domain comprises two antibody variable domains;
[0180] (ii) the first domain comprises one antibody variable domain and the second domain comprises two antibody variable domains;
[0181] (iii) the first domain comprises two antibody variable domains and the second domain comprises one antibody variable domain; or
[0182] (iv) the first domain comprises one antibody variable domain and the second domain comprises one antibody variable domain.

[0183] Accordingly, the first and the second domain may be binding domains comprising each two antibody variable domains such as a VH and a VL domain. Examples for such binding domains comprising two antibody variable domains where described herein above and comprise e.g. Fv fragments, scFv fragments or Fab fragments described herein above. Alternatively either one or both of those binding domains may comprise only a single variable domain. Examples for such single domain binding domains where described herein above and comprise e.g. nanobodies or single variable domain antibodies comprising merely one variable domain, which might be VHH, VH or VL, that specifically bind an antigen or epitope independently of other V regions or domains.

[0184] In a preferred embodiment of the antibody construct of the invention first and second domain are fused to the third domain via a peptide linker. Preferred peptide linker have been described herein above and are characterized by the amino acid sequence Gly-Gly-Gly-Gly-Ser, i.e. Gly₄Ser (SEQ ID NO: 1), or polymers thereof, i.e. (Gly₄Ser)x, where x is an integer of 1 or greater (e.g. 2 or 3). A particularly preferred linker for the fusion of the first and second domain to the third domain is depicted in SEQ ID NOs: 1.

[0185] In a preferred embodiment the antibody construct of the invention is characterized to comprise in an amino to carboxyl order:
[0186] (a) the first domain;
[0187] (b) a peptide linker having an amino acid sequence selected from the group consisting of SEQ ID NOs: 1-3;
[0188] (c) the second domain;
[0189] (d) a peptide linker having an amino acid sequence selected from the group consisting of SEQ ID NO: 1, 2, 3, 9, 10, 11 and 12;
[0190] (e) the first polypeptide monomer of the third domain;
[0191] (f) a peptide linker having an amino acid sequence selected from the group consisting of SEQ ID NOs: 5, 6, 7 and 8; and
[0192] (g) the second polypeptide monomer of the third domain.

[0193] In one aspect of the invention the target cell surface antigen bound by the first domain is a tumor antigen, an antigen specific for an immunological disorder or a viral antigen. The term “tumor antigen” as used herein may be understood as those antigens that are presented on tumor cells. These antigens can be presented on the cell surface with an extracellular part, which is often combined with a transmembrane and cytoplasmic part of the molecule. These antigens can sometimes be presented only by tumor cells and never by the normal ones. Tumor antigens can be exclusively expressed on tumor cells or might represent a tumor specific mutation compared to normal cells. In this case, they are called tumor-specific antigens. More common are antigens that are presented by tumor cells and normal cells, and they are called tumor-associated antigens. These tumor-associated antigens can be overexpressed compared to normal cells or are accessible for antibody binding in tumor cells due to the less compact structure of the tumor tissue compared to normal tissue. Non-limiting examples of tumor antigens as used herein are CDH19, MSLN, DLL3, FLT3, EGFRvIII, CD33, CD19, CD20, and CD70.

[0194] In a preferred embodiment of the antibody construct of the invention the tumor antigen is selected from the group consisting of CDH19, MSLN, DLL3, FLT3, EGFRvIII, CD33, CD19, CD20, and CD70.

[0195] In one aspect of the invention the antibody construct comprises in an amino to carboxyl order:
[0196] (a) the first domain having an amino acid sequence selected from the group consisting of SEQ ID NOs: 52, 70, 58, 76, 88, 106, 124, 94, 112, 130, 142, 160, 178, 148, 166, 184, 196, 214, 232, 202, 220, 238, 250, 266, 282, 298, 255, 271, 287, 303, 322, 338, 354, 370, 386, 402, 418, 434, 450, 466, 482, 498, 514, 530, 546, 327, 343, 359, 375, 391, 407, 423, 439, 455, 471, 487, 503, 519, 353, 551, 592, 608, 624, 640, 656, 672, 688, 704, 720, 736, 752, 768, 784, 800, 816, 832, 848, 864, 880, 896, 912, 928, 944, 960, 976, 992, 1008, 1024, 1040, 1056, 1072, 1088, 1104, 1120, 1136, 1152, 1168, 1184, 597, 613, 629, 645, 661, 677, 693, 709, 725, 741, 757, 773, 789, 805, 821, 837, 853, 869, 885, 901, 917, 933, 949, 965, 981, 997, 1013, 1029, 1045, 1061, 1077, 1093, 1109, 1125, 1141, 1157, 1173, 1189, 1277, 1289, 1301, 1313, 1325, 1337, 1349, 1361, 1373, 1385, 1397, 1409, 1421, 1433, 1445;
[0197] (b) a peptide linker having an amino acid sequence selected from the group consisting of SEQ ID NOs: 1-3;
[0198] (c) the second domain having an amino acid sequence selected from the group consisting of SEQ ID NOs: SEQ ID NOs: 23, 25, 41, 43, 59, 61, 77, 79, 95, 97, 113, 115, 131, 133, 149, 151, 167, 169, 185 or 187 of WO 2008/119567 or of SEQ ID NO: 15; (d) a peptide linker having an amino acid sequence selected from the group consisting of SEQ ID NOs: 1, 2, 3, 9, 10, 11 and 12;
[0199] (e) the first polypeptide monomer of the third domain having a polypeptide sequence selected from the group consisting of SEQ ID NOs: 17-24;
[0200] (f) a peptide linker having an amino acid sequence selected from the group consisting of SEQ ID NOs: 5, 6, 7 and 8; and
[0201] (g) the second polypeptide monomer of the third domain having a polypeptide sequence selected from the group consisting of SEQ ID NOs: 17-24.

[0202] In line with this preferred embodiment the first and second domain, which are fused via a peptide linker to a single chain polypeptide comprise a sequence selected from the group consisting of:
[0203] (a) SEQ ID NOs: 53 and 59; CD33
[0204] (b) SEQ ID NOs: 71 and 77; EGFRvIII
[0205] (c) SEQ ID NOs:89, 107, 125, 95, 113, and 131; MSLN
[0206] (d) SEQ ID NOs:143, 161, 179, 149, 167, and 185; CDH19
[0207] (e) SEQ ID NOs:197, 215, 233, 203, 221, and 239; DLL3
[0208] (f) SEQ ID NOs:251, 267, 283, 299, 256, 272, 288, and 304; CD19
[0209] (g) SEQ ID NOs:323, 339, 355, 371, 387, 403, 419, 435, 451, 467, 483, 499, 515, 531, 547, 328, 344, 360, 376, 392, 408, 424, 440, 456, 472, 488, 504, 520, 536, and 552; FLT3
[0210] (h) SEQ ID NOs:593, 609, 625, 641, 657, 673, 689, 705, 721, 737, 753, 769, 785, 801, 817, 833, 849, 865, 881, 897, 913, 929, 945, 961, 977, 993, 1009, 1025, 1041, 1057, 1073, 1089, 1105, 1121, 1137, 1153, 1169, 1185, 598, 614, 630, 646, 662, 678, 694, 710, 726, 742, 758, 774, 790, 806, 822, 838, 854, 870, 886, 902, 918, 934, 950, 966, 982, 998, 1014, 1030, 1046, 1062, 1078, 1094, 1110, 1126, 1142, 1158, 1174, and 1190; CD70
[0211] (i) SEQ ID NO: 1268; and CD20
[0212] (j) SEQ ID NOs: 1278, 1290, 1302, 1314, 1326, 1338, 1350, 1362, 1374, 1386, 1398, 1410, 1422, 1434, 1446. CD19

[0213] In one aspect the antibody construct of the invention is characterized by having an amino acid sequence selected from the group consisting of:
[0214] (a) SEQ ID NOs: 54, 55, 60, and 61; CD33
[0215] (b) SEQ ID NOs: 72, 73, 78, and 79; EGFRvIII
[0216] (c) SEQ ID NOs: 90, 91, 96, 97, 108, 109, 114, and 115; MSLN
[0217] (d) SEQ ID NOs: 144, 145, 150, 151, 162, 163, 168, 169, 180, 181, 186, and 187; CDH19
[0218] (e) SEQ ID NOs: 198, 199, 204, 205, 216, 217, 222, 223, 234, 235, 240, and 241; DLL3
[0219] (f) SEQ ID NOs: 252, 306, 257, 307, 268, 308, 273, 309, 284, 310, 289, 311, 300, 312, 305, and 313; CD19
[0220] (g) SEQ ID NOs: 324, 554, 329, 555, 340, 556, 345, 557, 356, 558, 361, 559, 372, 560, 377, 561, 388, 562, 393, 563, 404, 564, 409, 565, 420, 566, 425, 567, 436, 568, 441, 569, 452, 570, 457, 571, 468, 572, 473, 573, 484, 574, 489, 575, 500, 576, 505, 577, 516, 578, 521, 579, 532, 580, 537, 581, 548, 582, 553, and 583; FLT3
[0221] (h) SEQ ID NOs: 594, 610, 626, 642, 658, 674, 690, 706, 722, 738, 754, 77, 786, 802, 818, 834, 850, 866, 882, 898, 914, 930, 946, 962, 978, 994, 1010, 1026, 1042, 1058, 1074, 1090, 1106, 1122, 1138, 1154, 1170, 1186, 599, 615, 631, 647, 663, 679, 695, 711, 727, 743, 759, 775, 791, 807, 823, 839, 855, 871, 887, 903, 919, 935, 951, 967, 983, 999, 1015, 1031, 1047, 1063, 1079, 1095, 1111, 1127, 1143, 1159, 1175, 1191, and 1192-1267; CD70
[0222] (i) SEQ ID NO: 43; CD20
[0223] (j) SEQ ID Nos: 1279, 1280, 1291, 1292, 1303, 1304, 1315, 1316, 1327, 1328, 1339, 1340, 1351, 1352, 1363, 1364, 1375, 1376, 1387, 1388, 1399, 1400, 1411, 1412, 1423, 1424, 1435, 1436, 1447, 1448. CD19

[0224] The invention further provides a polynucleotide/nucleic acid molecule encoding an antibody construct of the invention. A polynucleotide is a biopolymer composed of 13 or more nucleotide monomers covalently bonded in a chain. DNA (such as cDNA) and RNA (such as mRNA) are examples of polynucleotides with distinct biological function. Nucleotides are organic molecules that serve as the monomers or subunits of nucleic acid molecules like DNA or RNA. The nucleic acid molecule or polynucleotide can be double stranded and single stranded, linear and circular. It is preferably comprised in a vector which is preferably comprised in a host cell. Said host cell is, e.g. after transformation or transfection with the vector or the polynucleotide of the invention, capable of expressing the antibody construct. For that purpose the polynucleotide or nucleic acid molecule is operatively linked with control sequences.

[0225] The genetic code is the set of rules by which information encoded within genetic material (nucleic acids) is translated into proteins. Biological decoding in living cells is accomplished by the ribosome which links amino acids in an order specified by mRNA, using tRNA molecules to carry amino acids and to read the mRNA three nucleotides at a time. The code defines how sequences of these nucleotide triplets, called codons, specify which amino acid will be added next during protein synthesis. With some exceptions, a three-nucleotide codon in a nucleic acid sequence specifies a single amino acid. Because the vast majority of genes are encoded with exactly the same code, this particular code is often referred to as the canonical or standard genetic code. While the genetic code determines the protein sequence for a given coding region, other genomic regions can influence when and where these proteins are produced.

[0226] Furthermore, the invention provides a vector comprising a polynucleotide/nucleic acid molecule of the invention. A vector is a nucleic acid molecule used as a vehicle to transfer (foreign) genetic material into a cell. The term “vector” encompasses—but is not restricted to—plasmids, viruses, cosmids and artificial chromosomes. In general, engineered vectors comprise an origin of replication, a multicloning site and a selectable marker. The vector itself is generally a nucleotide sequence, commonly a DNA sequence that comprises an insert (transgene) and a larger sequence that serves as the “backbone” of the vector.

[0227] Modern vectors may encompass additional features besides the transgene insert and a backbone: promoter, genetic marker, antibiotic resistance, reporter gene, targeting sequence, protein purification tag. Vectors called expression vectors (expression constructs) specifically are for the expression of the transgene in the target cell, and generally have control sequences.

[0228] The term “control sequences” refers to DNA sequences necessary for the expression of an operably linked coding sequence in a particular host organism. The control sequences that are suitable for prokaryotes, for example, include a promoter, optionally an operator sequence, and a ribosome binding side. Eukaryotic cells are known to utilize promoters, polyadenylation signals, and enhancers.

[0229] A nucleic acid is “operably linked” when it is placed into a functional relationship with another nucleic acid sequence. For example, DNA for a presequence or secretory leader is operably linked to DNA for a polypeptide if it is expressed as a preprotein that participates in the secretion of the polypeptide; a promoter or enhancer is operably linked to a coding sequence if it affects the transcription of the sequence; or a ribosome binding side is operably linked to a coding sequence if it is positioned so as to facilitate translation. Generally, “operably linked” means that the DNA sequences being linked are contiguous, and, in the case of a secretory leader, contiguous and in reading phase. However, enhancers do not have to be contiguous. Linking is accomplished by ligation at convenient restriction sites. If such sites do not exist, the synthetic oligonucleotide adaptors or linkers are used in accordance with conventional practice.

[0230] “Transfection” is the process of deliberately introducing nucleic acid molecules or polynucleotides (including vectors) into target cells. The term is mostly used for non-viral methods in eukaryotic cells. Transduction is often used to describe virus-mediated transfer of nucleic acid molecules or polynucleotides. Transfection of animal cells typically involves opening transient pores or “holes” in the cell membrane, to allow the uptake of material. Transfection can be carried out using calcium phosphate, by electroporation, by cell squeezing or by mixing a cationic lipid with the material to produce liposomes, which fuse with the cell membrane and deposit their cargo inside.

[0231] The term “transformation” is used to describe non-viral transfer of nucleic acid molecules or polynucleotides (including vectors) into bacteria, and also into non-animal eukaryotic cells, including plant cells. Transformation is hence the genetic alteration of a bacterial or non-animal eukaryotic cell resulting from the direct uptake through the cell membrane(s) from its surroundings and subsequent incorporation of exogenous genetic material (nucleic acid molecules). Transformation can be effected by artificial means. For transformation to happen, cells or bacteria must be in a state of competence, which might occur as a time-limited response to environmental conditions such as starvation and cell density.

[0232] Moreover, the invention provides a host cell transformed or transfected with the polynucleotide/nucleic acid molecule or with the vector of the invention. As used herein, the terms “host cell” or “recipient cell” are intended to include any individual cell or cell culture that can be or has/have been recipients of vectors, exogenous nucleic acid molecules, and polynucleotides encoding the antibody construct of the present invention; and/or recipients of the antibody construct itself. The introduction of the respective material into the cell is carried out by way of transformation, transfection and the like. The term “host cell” is also intended to include progeny or potential progeny of a single cell. Because certain modifications may occur in succeeding generations due to either natural, accidental, or deliberate mutation or due to environmental influences, such progeny may not, in fact, be completely identical (in morphology or in genomic or total DNA complement) to the parent cell, but is still included within the scope of the term as used herein. Suitable host cells include prokaryotic or eukaryotic cells, and also include but are not limited to bacteria, yeast cells, fungi cells, plant cells, and animal cells such as insect cells and mammalian cells, e.g., murine, rat, macaque or human.

[0233] The antibody construct of the invention can be produced in bacteria. After expression, the antibody construct of the invention is isolated from the E. coli cell paste in a soluble fraction and can be purified through, e.g., affinity chromatography and/or size exclusion. Final purification can be carried out similar to the process for purifying antibody expressed e.g., in CHO cells.

[0234] In addition to prokaryotes, eukaryotic microbes such as filamentous fungi or yeast are suitable cloning or expression hosts for the antibody construct of the invention. Saccharomyces cerevisiae, or common baker's yeast, is the most commonly used among lower eukaryotic host microorganisms. However, a number of other genera, species, and strains are commonly available and useful herein, such as Schizosaccharomyces pombe, Kluyveromyces hosts such as K. lactis, K. fragilis (ATCC 12424), K. bulgaricus (ATCC 16045), K. wickeramii (ATCC 24178), K. waltii (ATCC 56500), K. drosophilarum (ATCC 36906), K. thermotolerans, and K. marxianus; yarrowia (EP 402 226); Pichia pastoris (EP 183 070); Candida; Trichoderma reesia (EP 244 234); Neurospora crassa; Schwanniomyces such as Schwanniomyces occidentalis; and filamentous fungi such as Neurospora, Penicillium, Tolypocladium, and Aspergillus hosts such as A. nidulans and A. niger.

[0235] Suitable host cells for the expression of glycosylated antibody construct of the invention are derived from multicellular organisms. Examples of invertebrate cells include plant and insect cells. Numerous baculoviral strains and variants and corresponding permissive insect host cells from hosts such as Spodoptera frugiperda (caterpillar), Aedes aegypti (mosquito), Aedes albopictus (mosquito), Drosophila melanogaster (fruit fly), and Bombyx mori have been identified. A variety of viral strains for transfection are publicly available, e.g., the L-1 variant of Autographa californica NPV and the Bm-5 strain of Bombyx mori NPV, and such viruses may be used as the virus herein according to the present invention, particularly for transfection of Spodoptera frugiperda cells.

[0236] Plant cell cultures of cotton, corn, potato, soybean, petunia, tomato, Arabidopsis and tobacco can also be used as hosts. Cloning and expression vectors useful in the production of proteins in plant cell culture are known to those of skill in the art. See e.g. Hiatt et al., Nature (1989) 342: 76-78, Owen et al. (1992) Bio/Technology 10: 790-794, Artsaenko et al. (1995) The Plant J 8: 745-750, and Fecker et al. (1996) Plant Mol Biol 32: 979-986.

[0237] However, interest has been greatest in vertebrate cells, and propagation of vertebrate cells in culture (tissue culture) has become a routine procedure. Examples of useful mammalian host cell lines are monkey kidney CV1 line transformed by SV40 (COS-7, ATCC CRL 1651); human embryonic kidney line (293 or 293 cells subcloned for growth in suspension culture, Graham et al., J. Gen Virol. 36: 59 (1977)); baby hamster kidney cells (BHK, ATCC CCL 10); Chinese hamster ovary cells/-DHFR (CHO, Urlaub et al., Proc. Natl. Acad. Sci. USA 77: 4216 (1980)); mouse sertoli cells (TM4, Mather, Biol. Reprod. 23: 243-251 (1980)); monkey kidney cells (CVI ATCC CCL 70); African green monkey kidney cells (VERO-76, ATCC CRL1587); human cervical carcinoma cells (HELA, ATCC CCL 2); canine kidney cells (MDCK, ATCC CCL 34); buffalo rat liver cells (BRL 3A, ATCC CRL 1442); human lung cells (W138, ATCC CCL 75); human liver cells (Hep G2,1413 8065); mouse mammary tumor (MMT 060562, ATCC CCL5 1); TRI cells (Mather et al., Annals N. Y Acad. Sci. (1982) 383: 44-68); MRC 5 cells; FS4 cells; and a human hepatoma line (Hep G2).

[0238] In a further embodiment the invention provides a process for the production of an antibody construct of the invention, said process comprising culturing a host cell of the invention under conditions allowing the expression of the antibody construct of the invention and recovering the produced antibody construct from the culture.

[0239] As used herein, the term “culturing” refers to the in vitro maintenance, differentiation, growth, proliferation and/or propagation of cells under suitable conditions in a medium. The term “expression” includes any step involved in the production of an antibody construct of the invention including, but not limited to, transcription, post-transcriptional modification, translation, post-translational modification, and secretion.

[0240] When using recombinant techniques, the antibody construct can be produced intracellularly, in the periplasmic space, or directly secreted into the medium. If the antibody construct is produced intracellularly, as a first step, the particulate debris, either host cells or lysed fragments, are removed, for example, by centrifugation or ultrafiltration. Carter et al., Bio/Technology 10: 163-167 (1992) describe a procedure for isolating antibodies which are secreted to the periplasmic space of E. coli. Briefly, cell paste is thawed in the presence of sodium acetate (pH 3.5), EDTA, and phenylmethylsulfonylfluoride (PMSF) over about 30 min. Cell debris can be removed by centrifugation. Where the antibody is secreted into the medium, supernatants from such expression systems are generally first concentrated using a commercially available protein concentration filter, for example, an Amicon or Millipore Pellicon ultrafiltration unit. A protease inhibitor such as PMSF may be included in any of the foregoing steps to inhibit proteolysis and antibiotics may be included to prevent the growth of adventitious contaminants.

[0241] The antibody construct of the invention prepared from the host cells can be recovered or purified using, for example, hydroxylapatite chromatography, gel electrophoresis, dialysis, and affinity chromatography. Other techniques for protein purification such as fractionation on an ion-exchange column, ethanol precipitation, Reverse Phase HPLC, chromatography on silica, chromatography on heparin SEPHAROSE™, chromatography on an anion or cation exchange resin (such as a polyaspartic acid column), chromato-focusing, SDS-PAGE, and ammonium sulfate precipitation are also available depending on the antibody to be recovered. Where the antibody construct of the invention comprises a CH3 domain, the Bakerbond ABX resin (J.T. Baker, Phillipsburg, N.J.) is useful for purification.

[0242] Affinity chromatography is a preferred purification technique. The matrix to which the affinity ligand is attached is most often agarose, but other matrices are available. Mechanically stable matrices such as controlled pore glass or poly (styrenedivinyl) benzene allow for faster flow rates and shorter processing times than can be achieved with agarose.

[0243] Moreover, the invention provides a pharmaceutical composition comprising an antibody construct of the invention or an antibody construct produced according to the process of the invention. It is preferred for the pharmaceutical composition of the invention that the homogeneity of the antibody construct is ≧80%, more preferably ≧81%, ≧82%, ≧83%, ≧84%, or ≧85%, further preferably ≧86%, ≧87%, ≧88%, ≧89%, or ≧90%, still further preferably, ≧91%, ≧92%, ≧93%, ≧94%, or ≧95% and most preferably ≧96%, ≧97%, ≧98% or ≧99%.

[0244] As used herein, the term “pharmaceutical composition” relates to a composition which is suitable for administration to a patient, preferably a human patient. The particularly preferred pharmaceutical composition of this invention comprises one or a plurality of the antibody construct(s) of the invention, preferably in a therapeutically effective amount. Preferably, the pharmaceutical composition further comprises suitable formulations of one or more (pharmaceutically effective) carriers, stabilizers, excipients, diluents, solubilizers, surfactants, emulsifiers, preservatives and/or adjuvants. Acceptable constituents of the composition are preferably nontoxic to recipients at the dosages and concentrations employed. Pharmaceutical compositions of the invention include, but are not limited to, liquid, frozen, and lyophilized compositions.

[0245] The inventive compositions may comprise a pharmaceutically acceptable carrier. In general, as used herein, “pharmaceutically acceptable carrier” means any and all aqueous and non-aqueous solutions, sterile solutions, solvents, buffers, e.g. phosphate buffered saline (PBS) solutions, water, suspensions, emulsions, such as oil/water emulsions, various types of wetting agents, liposomes, dispersion media and coatings, which are compatible with pharmaceutical administration, in particular with parenteral administration. The use of such media and agents in pharmaceutical compositions is well known in the art, and the compositions comprising such carriers can be formulated by well-known conventional methods.

[0246] Certain embodiments provide pharmaceutical compositions comprising the antibody construct of the invention and further one or more excipients such as those illustratively described in this section and elsewhere herein. Excipients can be used in the invention in this regard for a wide variety of purposes, such as adjusting physical, chemical, or biological properties of formulations, such as adjustment of viscosity, and or processes of the invention to improve effectiveness and or to stabilize such formulations and processes against degradation and spoilage due to, for instance, stresses that occur during manufacturing, shipping, storage, pre-use preparation, administration, and thereafter.

[0247] In certain embodiments, the pharmaceutical composition may contain formulation materials for the purpose of modifying, maintaining or preserving, e.g., the pH, osmolarity, viscosity, clarity, color, isotonicity, odor, sterility, stability, rate of dissolution or release, adsorption or penetration of the composition (see, REMINGTON'S PHARMACEUTICAL SCIENCES, 18″ Edition, (A. R. Genrmo, ed.), 1990, Mack Publishing Company). In such embodiments, suitable formulation materials may include, but are not limited to:
[0248] amino acids such as glycine, alanine, glutamine, asparagine, threonine, proline, 2-phenylalanine, including charged amino acids, preferably lysine, lysine acetate, arginine, glutamate and/or histidine
[0249] antimicrobials such as antibacterial and antifungal agents
[0250] antioxidants such as ascorbic acid, methionine, sodium sulfite or sodium hydrogen-sulfite;
[0251] buffers, buffer systems and buffering agents which are used to maintain the composition at physiological pH or at a slightly lower pH; examples of buffers are borate, bicarbonate, Tris-HCl, citrates, phosphates or other organic acids, succinate, phosphate, and histidine; for example Tris buffer of about pH 7.0-8.5;
[0252] non-aqueous solvents such as propylene glycol, polyethylene glycol, vegetable oils such as olive oil, and injectable organic esters such as ethyl oleate;
[0253] aqueous carriers including water, alcoholic/aqueous solutions, emulsions or suspensions, including saline and buffered media;
[0254] biodegradable polymers such as polyesters;
[0255] bulking agents such as mannitol or glycine;
[0256] chelating agents such as ethylenediamine tetraacetic acid (EDTA);
[0257] isotonic and absorption delaying agents;
[0258] complexing agents such as caffeine, polyvinylpyrrolidone, beta-cyclodextrin or hydroxypropyl-beta-cyclodextrin)
[0259] fillers;
[0260] monosaccharides; disaccharides; and other carbohydrates (such as glucose, mannose or dextrins); carbohydrates may be non-reducing sugars, preferably trehalose, sucrose, octasulfate, sorbitol or xylitol;
[0261] (low molecular weight) proteins, polypeptides or proteinaceous carriers such as human or bovine serum albumin, gelatin or immunoglobulins, preferably of human origin;
[0262] coloring and flavouring agents;
[0263] sulfur containing reducing agents, such as glutathione, thioctic acid, sodium thioglycolate, thioglycerol, [alpha]-monothioglycerol, and sodium thio sulfate
[0264] diluting agents;
[0265] emulsifying agents;
[0266] hydrophilic polymers such as polyvinylpyrrolidone)
[0267] salt-forming counter-ions such as sodium;
[0268] preservatives such as antimicrobials, anti-oxidants, chelating agents, inert gases and the like; examples are: benzalkonium chloride, benzoic acid, salicylic acid, thimerosal, phenethyl alcohol, methylparaben, propylparaben, chlorhexidine, sorbic acid or hydrogen peroxide);
[0269] metal complexes such as Zn-protein complexes;
[0270] solvents and co-solvents (such as glycerin, propylene glycol or polyethylene glycol);
[0271] sugars and sugar alcohols, such as trehalose, sucrose, octasulfate, mannitol, sorbitol or xylitol stachyose, mannose, sorbose, xylose, ribose, myoinisitose, galactose, lactitol, ribitol, myoinisitol, galactitol, glycerol, cyclitols (e.g., inositol), polyethylene glycol; and polyhydric sugar alcohols;
[0272] suspending agents;
[0273] surfactants or wetting agents such as pluronics, PEG, sorbitan esters, polysorbates such as polysorbate 20, polysorbate, triton, tromethamine, lecithin, cholesterol, tyloxapal; surfactants may be detergents, preferably with a molecular weight of >1.2 KD and/or a polyether, preferably with a molecular weight of >3 KD; non-limiting examples for preferred detergents are Tween 20, Tween 40, Tween 60, Tween 80 and Tween 85; non-limiting examples for preferred polyethers are PEG 3000, PEG 3350, PEG 4000 and PEG 5000;
[0274] stability enhancing agents such as sucrose or sorbitol;
[0275] tonicity enhancing agents such as alkali metal halides, preferably sodium or potassium chloride, mannitol sorbitol;
[0276] parenteral delivery vehicles including sodium chloride solution, Ringer's dextrose, dextrose and sodium chloride, lactated Ringer's, or fixed oils;
[0277] intravenous delivery vehicles including fluid and nutrient replenishers, electrolyte replenishers (such as those based on Ringer's dextrose).

[0278] It is evident to those skilled in the art that the different constituents of the pharmaceutical composition (e.g., those listed above) can have different effects, for example, and amino acid can act as a buffer, a stabilizer and/or an antioxidant; mannitol can act as a bulking agent and/or a tonicity enhancing agent; sodium chloride can act as delivery vehicle and/or tonicity enhancing agent; etc.

[0279] It is envisaged that the composition of the invention might comprise, in addition to the polypeptide of the invention defined herein, further biologically active agents, depending on the intended use of the composition. Such agents might be drugs acting on the gastro-intestinal system, drugs acting as cytostatica, drugs preventing hyperurikemia, drugs inhibiting immunoreactions (e.g. corticosteroids), drugs modulating the inflammatory response, drugs acting on the circulatory system and/or agents such as cytokines known in the art. It is also envisaged that the antibody construct of the present invention is applied in a co-therapy, i.e., in combination with another anti-cancer medicament.

[0280] In certain embodiments, the optimal pharmaceutical composition will be determined by one skilled in the art depending upon, for example, the intended route of administration, delivery format and desired dosage. See, for example, REMINGTON'S PHARMACEUTICAL SCIENCES, supra. In certain embodiments, such compositions may influence the physical state, stability, rate of in vivo release and rate of in vivo clearance of the antibody construct of the invention. In certain embodiments, the primary vehicle or carrier in a pharmaceutical composition may be either aqueous or non-aqueous in nature. For example, a suitable vehicle or carrier may be water for injection, physiological saline solution or artificial cerebrospinal fluid, possibly supplemented with other materials common in compositions for parenteral administration. Neutral buffered saline or saline mixed with serum albumin are further exemplary vehicles. In certain embodiments, the antibody construct of the invention compositions may be prepared for storage by mixing the selected composition having the desired degree of purity with optional formulation agents (REMINGTON'S PHARMACEUTICAL SCIENCES, supra) in the form of a lyophilized cake or an aqueous solution. Further, in certain embodiments, the antibody construct of the invention may be formulated as a lyophilizate using appropriate excipients such as sucrose.

[0281] When parenteral administration is contemplated, the therapeutic compositions for use in this invention may be provided in the form of a pyrogen-free, parenterally acceptable aqueous solution comprising the desired antibody construct of the invention in a pharmaceutically acceptable vehicle. A particularly suitable vehicle for parenteral injection is sterile distilled water in which the antibody construct of the invention is formulated as a sterile, isotonic solution, properly preserved. In certain embodiments, the preparation can involve the formulation of the desired molecule with an agent, such as injectable microspheres, bio-erodible particles, polymeric compounds (such as polylactic acid or polyglycolic acid), beads or liposomes, that may provide controlled or sustained release of the product which can be delivered via depot injection. In certain embodiments, hyaluronic acid may also be used, having the effect of promoting sustained duration in the circulation. In certain embodiments, implantable drug delivery devices may be used to introduce the desired antibody construct.

[0282] Additional pharmaceutical compositions will be evident to those skilled in the art, including formulations involving the antibody construct of the invention in sustained- or controlled-delivery/release formulations. Techniques for formulating a variety of other sustained- or controlled-delivery means, such as liposome carriers, bio-erodible microparticles or porous beads and depot injections, are also known to those skilled in the art. See, for example, International Patent Application No. PCT/US93/00829, which describes controlled release of porous polymeric microparticles for delivery of pharmaceutical compositions. Sustained-release preparations may include semipermeable polymer matrices in the form of shaped articles, e.g., films, or microcapsules. Sustained release matrices may include polyesters, hydrogels, polylactides (as disclosed in U.S. Pat. No. 3,773,919 and European Patent Application Publication No. EP 058481), copolymers of L-glutamic acid and gamma ethyl-L-glutamate (Sidman et al., 1983, Biopolymers 2:547-556), poly (2-hydroxyethyl-methacrylate) (Langer et al., 1981, J. Biomed. Mater. Res. 15:167-277 and Langer, 1982, Chem. Tech. 12:98-105), ethylene vinyl acetate (Langer et al., 1981, supra) or poly-D(−)-3-hydroxybutyric acid (European Patent Application Publication No. EP 133,988). Sustained release compositions may also include liposomes that can be prepared by any of several methods known in the art. See, e.g., Eppstein et al., 1985, Proc. Natl. Acad. Sci. U.S.A. 82:3688-3692; European Patent Application Publication Nos. EP 036,676; EP 088,046 and EP 143,949.

[0283] The antibody construct may also be entrapped in microcapsules prepared, for example, by coacervation techniques or by interfacial polymerization (for example, hydroxymethylcellulose or gelatine-microcapsules and poly (methylmethacylate) microcapsules, respectively), in colloidal drug delivery systems (for example, liposomes, albumin microspheres, microemulsions, nanoparticles and nanocapsules), or in macroemulsions. Such techniques are disclosed in Remington's Pharmaceutical Sciences, 16th edition, Oslo, A., Ed., (1980).

[0284] Pharmaceutical compositions used for in vivo administration are typically provided as sterile preparations. Sterilization can be accomplished by filtration through sterile filtration membranes. When the composition is lyophilized, sterilization using this method may be conducted either prior to or following lyophilization and reconstitution. Compositions for parenteral administration can be stored in lyophilized form or in a solution. Parenteral compositions generally are placed into a container having a sterile access port, for example, an intravenous solution bag or vial having a stopper pierceable by a hypodermic injection needle.

[0285] Another aspect of the invention includes self-buffering antibody construct of the invention formulations, which can be used as pharmaceutical compositions, as described in international patent application WO 06138181A2 (PCT/US2006/022599). A variety of expositions are available on protein stabilization and formulation materials and methods useful in this regard, such as Arakawa et al., “Solvent interactions in pharmaceutical formulations,” Pharm Res. 8(3): 285-91 (1991); Kendrick et al., “Physical stabilization of proteins in aqueous solution” in: RATIONAL DESIGN OF STABLE PROTEIN FORMULATIONS: THEORY AND PRACTICE, Carpenter and Manning, eds. Pharmaceutical Biotechnology. 13: 61-84 (2002), and Randolph et al., “Surfactant-protein interactions”, Pharm Biotechnol. 13: 159-75 (2002), see particularly the parts pertinent to excipients and processes of the same for self-buffering protein formulations in accordance with the current invention, especially as to protein pharmaceutical products and processes for veterinary and/or human medical uses.

[0286] Salts may be used in accordance with certain embodiments of the invention to, for example, adjust the ionic strength and/or the isotonicity of a formulation and/or to improve the solubility and/or physical stability of a protein or other ingredient of a composition in accordance with the invention. As is well known, ions can stabilize the native state of proteins by binding to charged residues on the protein's surface and by shielding charged and polar groups in the protein and reducing the strength of their electrostatic interactions, attractive, and repulsive interactions. Ions also can stabilize the denatured state of a protein by binding to, in particular, the denatured peptide linkages (—CONH) of the protein. Furthermore, ionic interaction with charged and polar groups in a protein also can reduce intermolecular electrostatic interactions and, thereby, prevent or reduce protein aggregation and insolubility.

[0287] Ionic species differ significantly in their effects on proteins. A number of categorical rankings of ions and their effects on proteins have been developed that can be used in formulating pharmaceutical compositions in accordance with the invention. One example is the Hofmeister series, which ranks ionic and polar non-ionic solutes by their effect on the conformational stability of proteins in solution. Stabilizing solutes are referred to as “kosmotropic”. Destabilizing solutes are referred to as “chaotropic”. Kosmotropes commonly are used at high concentrations (e.g., >1 molar ammonium sulfate) to precipitate proteins from solution (“salting-out”). Chaotropes commonly are used to denture and/or to solubilize proteins (“salting-in”). The relative effectiveness of ions to “salt-in” and “salt-out” defines their position in the Hofmeister series.

[0288] Free amino acids can be used in the antibody construct of the invention formulations in accordance with various embodiments of the invention as bulking agents, stabilizers, and antioxidants, as well as other standard uses. Lysine, proline, serine, and alanine can be used for stabilizing proteins in a formulation. Glycine is useful in lyophilization to ensure correct cake structure and properties. Arginine may be useful to inhibit protein aggregation, in both liquid and lyophilized formulations. Methionine is useful as an antioxidant.

[0289] Polyols include sugars, e.g., mannitol, sucrose, and sorbitol and polyhydric alcohols such as, for instance, glycerol and propylene glycol, and, for purposes of discussion herein, polyethylene glycol (PEG) and related substances. Polyols are kosmotropic. They are useful stabilizing agents in both liquid and lyophilized formulations to protect proteins from physical and chemical degradation processes. Polyols also are useful for adjusting the tonicity of formulations. Among polyols useful in select embodiments of the invention is mannitol, commonly used to ensure structural stability of the cake in lyophilized formulations. It ensures structural stability to the cake. It is generally used with a lyoprotectant, e.g., sucrose. Sorbitol and sucrose are among preferred agents for adjusting tonicity and as stabilizers to protect against freeze-thaw stresses during transport or the preparation of bulks during the manufacturing process. Reducing sugars (which contain free aldehyde or ketone groups), such as glucose and lactose, can glycate surface lysine and arginine residues. Therefore, they generally are not among preferred polyols for use in accordance with the invention. In addition, sugars that form such reactive species, such as sucrose, which is hydrolyzed to fructose and glucose under acidic conditions, and consequently engenders glycation, also is not among preferred polyols of the invention in this regard. PEG is useful to stabilize proteins and as a cryoprotectant and can be used in the invention in this regard.

[0290] Embodiments of the antibody construct of the invention formulations further comprise surfactants. Protein molecules may be susceptible to adsorption on surfaces and to denaturation and consequent aggregation at air-liquid, solid-liquid, and liquid-liquid interfaces. These effects generally scale inversely with protein concentration. These deleterious interactions generally scale inversely with protein concentration and typically are exacerbated by physical agitation, such as that generated during the shipping and handling of a product. Surfactants routinely are used to prevent, minimize, or reduce surface adsorption. Useful surfactants in the invention in this regard include polysorbate 20, polysorbate 80, other fatty acid esters of sorbitan polyethoxylates, and poloxamer 188. Surfactants also are commonly used to control protein conformational stability. The use of surfactants in this regard is protein-specific since, any given surfactant typically will stabilize some proteins and destabilize others.

[0291] Polysorbates are susceptible to oxidative degradation and often, as supplied, contain sufficient quantities of peroxides to cause oxidation of protein residue side-chains, especially methionine. Consequently, polysorbates should be used carefully, and when used, should be employed at their lowest effective concentration. In this regard, polysorbates exemplify the general rule that excipients should be used in their lowest effective concentrations.

[0292] Embodiments of the antibody construct of the invention formulations further comprise one or more antioxidants. To some extent deleterious oxidation of proteins can be prevented in pharmaceutical formulations by maintaining proper levels of ambient oxygen and temperature and by avoiding exposure to light. Antioxidant excipients can be used as well to prevent oxidative degradation of proteins. Among useful antioxidants in this regard are reducing agents, oxygen/free-radical scavengers, and chelating agents. Antioxidants for use in therapeutic protein formulations in accordance with the invention preferably are water-soluble and maintain their activity throughout the shelf life of a product. EDTA is a preferred antioxidant in accordance with the invention in this regard. Antioxidants can damage proteins. For instance, reducing agents, such as glutathione in particular, can disrupt intramolecular disulfide linkages. Thus, antioxidants for use in the invention are selected to, among other things, eliminate or sufficiently reduce the possibility of themselves damaging proteins in the formulation.

[0293] Formulations in accordance with the invention may include metal ions that are protein co-factors and that are necessary to form protein coordination complexes, such as zinc necessary to form certain insulin suspensions. Metal ions also can inhibit some processes that degrade proteins. However, metal ions also catalyze physical and chemical processes that degrade proteins. Magnesium ions (10-120 mM) can be used to inhibit isomerization of aspartic acid to isoaspartic acid. Ca⁺² ions (up to 100 mM) can increase the stability of human deoxyribonuclease. Mg⁺², Mn⁺², and Zn⁺², however, can destabilize rhDNase. Similarly, Ca⁺² and Sr⁺² can stabilize Factor VIII, it can be destabilized by Mg⁺², Mn⁺² and Zn⁺², Cu⁺² and Fe⁺², and its aggregation can be increased by Al⁺³ ions.

[0294] Embodiments of the antibody construct of the invention formulations further comprise one or more preservatives. Preservatives are necessary when developing multi-dose parenteral formulations that involve more than one extraction from the same container. Their primary function is to inhibit microbial growth and ensure product sterility throughout the shelf-life or term of use of the drug product. Commonly used preservatives include benzyl alcohol, phenol and m-cresol. Although preservatives have a long history of use with small-molecule parenterals, the development of protein formulations that includes preservatives can be challenging. Preservatives almost always have a destabilizing effect (aggregation) on proteins, and this has become a major factor in limiting their use in multi-dose protein formulations. To date, most protein drugs have been formulated for single-use only. However, when multi-dose formulations are possible, they have the added advantage of enabling patient convenience, and increased marketability. A good example is that of human growth hormone (hGH) where the development of preserved formulations has led to commercialization of more convenient, multi-use injection pen presentations. At least four such pen devices containing preserved formulations of hGH are currently available on the market. Norditropin (liquid, Novo Nordisk), Nutropin AQ (liquid, Genentech) & Genotropin (lyophilized—dual chamber cartridge, Pharmacia & Upjohn) contain phenol while Somatrope (Eli Lilly) is formulated with m-cresol. Several aspects need to be considered during the formulation and development of preserved dosage forms. The effective preservative concentration in the drug product must be optimized. This requires testing a given preservative in the dosage form with concentration ranges that confer anti-microbial effectiveness without compromising protein stability.

[0295] As might be expected, development of liquid formulations containing preservatives are more challenging than lyophilized formulations. Freeze-dried products can be lyophilized without the preservative and reconstituted with a preservative containing diluent at the time of use. This shortens the time for which a preservative is in contact with the protein, significantly minimizing the associated stability risks. With liquid formulations, preservative effectiveness and stability should be maintained over the entire product shelf-life (about 18 to 24 months). An important point to note is that preservative effectiveness should be demonstrated in the final formulation containing the active drug and all excipient components.

[0296] The antibody constructs disclosed herein may also be formulated as immuno-liposomes. A “liposome” is a small vesicle composed of various types of lipids, phospholipids and/or surfactant which is useful for delivery of a drug to a mammal. The components of the liposome are commonly arranged in a bilayer formation, similar to the lipid arrangement of biological membranes. Liposomes containing the antibody construct are prepared by methods known in the art, such as described in Epstein et al., Proc. Natl. Acad. Sci. USA, 82: 3688 (1985); Hwang et al., Proc. Natl Acad. Sci. USA, 77: 4030 (1980); U.S. Pat. Nos. 4,485,045 and 4,544,545; and WO 97/38731. Liposomes with enhanced circulation time are disclosed in U.S. Pat. No. 5,013,556. Particularly useful liposomes can be generated by the reverse phase evaporation method with a lipid composition comprising phosphatidylcholine, cholesterol and PEG-derivatized phosphatidylethanolamine (PEG-PE). Liposomes are extruded through filters of defined pore size to yield liposomes with the desired diameter. Fab′ fragments of the antibody construct of the present invention can be conjugated to the liposomes as described in Martin et al. J. Biol. Chem. 257: 286-288 (1982) via a disulfide interchange reaction. A chemotherapeutic agent is optionally contained within the liposome. See Gabizon et al. J. National Cancer Inst. 81 (19) 1484 (1989).

[0297] Once the pharmaceutical composition has been formulated, it may be stored in sterile vials as a solution, suspension, gel, emulsion, solid, crystal, or as a dehydrated or lyophilized powder. Such formulations may be stored either in a ready-to-use form or in a form (e.g., lyophilized) that is reconstituted prior to administration.

[0298] The biological activity of the pharmaceutical composition defined herein can be determined for instance by cytotoxicity assays, as described in the following examples, in WO99/54440 or by Schlereth et al. (Cancer Immunol. Immunother. 20 (2005), 1-12). “Efficacy” or “in vivo efficacy” as used herein refers to the response to therapy by the pharmaceutical composition of the invention, using e.g. standardized NCI response criteria. The success or in vivo efficacy of the therapy using a pharmaceutical composition of the invention refers to the effectiveness of the composition for its intended purpose, i.e. the ability of the composition to cause its desired effect, i.e. depletion of pathologic cells, e.g. tumor cells. The in vivo efficacy may be monitored by established standard methods for the respective disease entities including, but not limited to white blood cell counts, differentials, Fluorescence Activated Cell Sorting, bone marrow aspiration. In addition, various disease specific clinical chemistry parameters and other established standard methods may be used. Furthermore, computer-aided tomography, X-ray, nuclear magnetic resonance tomography (e.g. for National Cancer Institute-criteria based response assessment [Cheson B D, Horning S J, Coiffier B, Shipp M A, Fisher R I, Connors J M, Lister T A, Vose J, Grillo-Lopez A, Hagenbeek A, Cabanillas F, Klippensten D, Hiddemann W, Castellino R, Harris N L, Armitage J O, Carter W, Hoppe R, Canellos G P. Report of an international workshop to standardize response criteria for non-Hodgkin's lymphomas. NCI Sponsored International Working Group. J Clin Oncol. 1999 April; 17(4):1244]), positron-emission tomography scanning, white blood cell counts, differentials, Fluorescence Activated Cell Sorting, bone marrow aspiration, lymph node biopsies/histologies, and various lymphoma specific clinical chemistry parameters (e.g. lactate dehydrogenase) and other established standard methods may be used.

[0299] Another major challenge in the development of drugs such as the pharmaceutical composition of the invention is the predictable modulation of pharmacokinetic properties. To this end, a pharmacokinetic profile of the drug candidate, i.e. a profile of the pharmacokinetic parameters that affect the ability of a particular drug to treat a given condition, can be established. Pharmacokinetic parameters of the drug influencing the ability of a drug for treating a certain disease entity include, but are not limited to: half-life, volume of distribution, hepatic first-pass metabolism and the degree of blood serum binding. The efficacy of a given drug agent can be influenced by each of the parameters mentioned above. It is an envisaged characteristic of the antibody constructs of the present invention provided with the specific FC modality that they comprise, for example, differences in pharmacokinetic behavior. A half-life extended targeting antibody construct according to the present invention preferably shows a surprisingly increased residence time in vivo in comparison to “canonical” non-HLE versions of said antibody construct.

[0300] “Half-life” means the time where 50% of an administered drug are eliminated through biological processes, e.g. metabolism, excretion, etc. By “hepatic first-pass metabolism” is meant the propensity of a drug to be metabolized upon first contact with the liver, i.e. during its first pass through the liver. “Volume of distribution” means the degree of retention of a drug throughout the various compartments of the body, like e.g. intracellular and extracellular spaces, tissues and organs, etc. and the distribution of the drug within these compartments. “Degree of blood serum binding” means the propensity of a drug to interact with and bind to blood serum proteins, such as albumin, leading to a reduction or loss of biological activity of the drug.

[0301] Pharmacokinetic parameters also include bioavailability, lag time (TIag), Tmax, absorption rates, more onset and/or Cmax for a given amount of drug administered. “Bioavailability” means the amount of a drug in the blood compartment. “Lag time” means the time delay between the administration of the drug and its detection and measurability in blood or plasma. “Tmax” is the time after which maximal blood concentration of the drug is reached, and “Cmax” is the blood concentration maximally obtained with a given drug. The time to reach a blood or tissue concentration of the drug which is required for its biological effect is influenced by all parameters. Pharmacokinetic parameters of bispecific antibody constructs exhibiting cross-species specificity, which may be determined in preclinical animal testing in non-chimpanzee primates as outlined above, are also set forth e.g. in the publication by Schlereth et al. (Cancer Immunol. Immunother. 20 (2005), 1-12).

[0302] In a preferred aspect of the invention the pharmaceutical composition is stable for at least four weeks at about −20° C. As apparent from the appended examples the quality of an antibody construct of the invention vs. the quality of corresponding state of the art antibody constructs may be tested using different systems. Those tests are understood to be in line with the “ICH Harmonised Tripartite Guideline: Stability Testing of Biotechnological/Biological Products Q5C and Specifications: Test procedures and Acceptance Criteria for Biotech Biotechnological/Biological Products Q6B” and, thus are elected to provide a stability-indicating profile that provides certainty that changes in the identity, purity and potency of the product are detected. It is well accepted that the term purity is a relative term. Due to the effect of glycosylation, deamidation, or other heterogeneities, the absolute purity of a biotechnological/biological product should be typically assessed by more than one method and the purity value derived is method-dependent. For the purpose of stability testing, tests for purity should focus on methods for determination of degradation products.

[0303] For the assessment of the quality of a pharmaceutical composition comprising an antibody construct of the invention may be analyzed e.g. by analyzing the content of soluble aggregates in a solution (HMWS per size exclusion). It is preferred that stability for at least four weeks at about −20° C. is characterized by a content of less than 1.5% HMWS, preferably by less than 1% HMWS.

[0304] A preferred formulation for the antibody construct as a pharmaceutical composition may e.g. comprise the components of a formulation as described below:
[0305] Formulation:
[0306] potassium phosphate, L-arginine hydrochloride, trehalose dihydrate, polysorbate 80 at pH 6.0

[0307] Other examples for the assessment of the stability of an antibody construct of the invention in form of a pharmaceutical composition are provided in the appended examples 4-12. In those examples embodiments of antibody constructs of the invention are tested with respect to different stress conditions in different pharmaceutical formulations and the results compared with other half-life extending (HLE) formats of bispecific T cell engaging antibody construct known from the art. In general, it is envisaged that antibody constructs provided with the specific FC modality according to the present invention are typically more stable over a broad range of stress conditions such as temperature and light stress, both compared to antibody constructs provided with different HLE formats and without any HLE format (e.g. “canonical” antibody constructs). Said temperature stability may relate both to decreased (below room temperature including freezing) and increased (above room temperature including temperatures up to or above body temperature) temperature. As the person skilled in the art will acknowledge, such improved stability with regard to stress, which is hardly avoidable in clinical practice, makes the antibody construct safer because less degradation products will occur in clinical practice. In consequence, said increased stability means increased safety.

[0308] One embodiment provides the antibody construct of the invention or the antibody construct produced according to the process of the invention for use in the prevention, treatment or amelioration of a proliferative disease, a tumorous disease, a viral disease or an immunological disorder.

[0309] The formulations described herein are useful as pharmaceutical compositions in the treatment, amelioration and/or prevention of the pathological medical condition as described herein in a patient in need thereof. The term “treatment” refers to both therapeutic treatment and prophylactic or preventative measures. Treatment includes the application or administration of the formulation to the body, an isolated tissue, or cell from a patient who has a disease/disorder, a symptom of a disease/disorder, or a predisposition toward a disease/disorder, with the purpose to cure, heal, alleviate, relieve, alter, remedy, ameliorate, improve, or affect the disease, the symptom of the disease, or the predisposition toward the disease.

[0310] The term “amelioration” as used herein refers to any improvement of the disease state of a patient having a tumor or cancer or a metastatic cancer as specified herein below, by the administration of an antibody construct according to the invention to a subject in need thereof. Such an improvement may also be seen as a slowing or stopping of the progression of the tumor or cancer or metastatic cancer of the patient. The term “prevention” as used herein means the avoidance of the occurrence or re-occurrence of a patient having a tumor or cancer or a metastatic cancer as specified herein below, by the administration of an antibody construct according to the invention to a subject in need thereof.

[0311] The term “disease” refers to any condition that would benefit from treatment with the antibody construct or the pharmaceutic composition described herein. This includes chronic and acute disorders or diseases including those pathological conditions that predispose the mammal to the disease in question.

[0312] A “neoplasm” is an abnormal growth of tissue, usually but not always forming a mass. When also forming a mass, it is commonly referred to as a “tumor”. Neoplasms or tumors or can be benign, potentially malignant (pre-cancerous), or malignant. Malignant neoplasms are commonly called cancer. They usually invade and destroy the surrounding tissue and may form metastases, i.e., they spread to other parts, tissues or organs of the body. Hence, the term “metatstatic cancer” encompasses metastases to other tissues or organs than the one of the original tumor. Lymphomas and leukemias are lymphoid neoplasms. For the purposes of the present invention, they are also encompassed by the terms “tumor” or “cancer”.

[0313] The term “viral disease” describes diseases, which are the result of a viral infection of a subject.

[0314] The term “immunological disorder” as used herein describes in line with the common definition of this term immunological disorders such as autoimmune diseases, hypersensitivities, immune deficiencies.

[0315] In one embodiment the invention provides a method for the treatment or amelioration of a proliferative disease, a tumorous disease, a viral disease or an immunological disorder, comprising the step of administering to a subject in need thereof the antibody construct of the invention, or produced according to the process of the invention.

[0316] The terms “subject in need” or those “in need of treatment” includes those already with the disorder, as well as those in which the disorder is to be prevented. The subject in need or “patient” includes human and other mammalian subjects that receive either prophylactic or therapeutic treatment.

[0317] The antibody construct of the invention will generally be designed for specific routes and methods of administration, for specific dosages and frequencies of administration, for specific treatments of specific diseases, with ranges of bio-availability and persistence, among other things. The materials of the composition are preferably formulated in concentrations that are acceptable for the site of administration.

[0318] Formulations and compositions thus may be designed in accordance with the invention for delivery by any suitable route of administration. In the context of the present invention, the routes of administration include, but are not limited to
[0319] topical routes (such as epicutaneous, inhalational, nasal, opthalmic, auricular/aural, vaginal, mucosal);
[0320] enteral routes (such as oral, gastrointestinal, sublingual, sublabial, buccal, rectal); and
[0321] parenteral routes (such as intravenous, intraarterial, intraosseous, intramuscular, intracerebral, intracerebroventricular, epidural, intrathecal, subcutaneous, intraperitoneal, extra-amniotic, intraarticular, intracardiac, intradermal, intralesional, intrauterine, intravesical, intravitreal, transdermal, intranasal, transmucosal, intrasynovial, intraluminal).

[0322] The pharmaceutical compositions and the antibody construct of this invention are particularly useful for parenteral administration, e.g., subcutaneous or intravenous delivery, for example by injection such as bolus injection, or by infusion such as continuous infusion. Pharmaceutical compositions may be administered using a medical device. Examples of medical devices for administering pharmaceutical compositions are described in U.S. Pat. Nos. 4,475,196; 4,439,196; 4,447,224; 4,447, 233; 4,486,194; 4,487,603; 4,596,556; 4,790,824; 4,941,880; 5,064,413; 5,312,335; 5,312,335; 5,383,851; and 5,399,163.

[0323] In particular, the present invention provides for an uninterrupted administration of the suitable composition. As a non-limiting example, uninterrupted or substantially uninterrupted, i.e. continuous administration may be realized by a small pump system worn by the patient for metering the influx of therapeutic agent into the body of the patient. The pharmaceutical composition comprising the antibody construct of the invention can be administered by using said pump systems. Such pump systems are generally known in the art, and commonly rely on periodic exchange of cartridges containing the therapeutic agent to be infused. When exchanging the cartridge in such a pump system, a temporary interruption of the otherwise uninterrupted flow of therapeutic agent into the body of the patient may ensue. In such a case, the phase of administration prior to cartridge replacement and the phase of administration following cartridge replacement would still be considered within the meaning of the pharmaceutical means and methods of the invention together make up one “uninterrupted administration” of such therapeutic agent.

[0324] The continuous or uninterrupted administration of the antibody constructs of the invention may be intravenous or subcutaneous by way of a fluid delivery device or small pump system including a fluid driving mechanism for driving fluid out of a reservoir and an actuating mechanism for actuating the driving mechanism. Pump systems for subcutaneous administration may include a needle or a cannula for penetrating the skin of a patient and delivering the suitable composition into the patient's body. Said pump systems may be directly fixed or attached to the skin of the patient independently of a vein, artery or blood vessel, thereby allowing a direct contact between the pump system and the skin of the patient. The pump system can be attached to the skin of the patient for 24 hours up to several days. The pump system may be of small size with a reservoir for small volumes. As a non-limiting example, the volume of the reservoir for the suitable pharmaceutical composition to be administered can be between 0.1 and 50 ml.

[0325] The continuous administration may also be transdermal by way of a patch worn on the skin and replaced at intervals. One of skill in the art is aware of patch systems for drug delivery suitable for this purpose. It is of note that transdermal administration is especially amenable to uninterrupted administration, as exchange of a first exhausted patch can advantageously be accomplished simultaneously with the placement of a new, second patch, for example on the surface of the skin immediately adjacent to the first exhausted patch and immediately prior to removal of the first exhausted patch. Issues of flow interruption or power cell failure do not arise.

[0326] If the pharmaceutical composition has been lyophilized, the lyophilized material is first reconstituted in an appropriate liquid prior to administration. The lyophilized material may be reconstituted in, e.g., bacteriostatic water for injection (BWFI), physiological saline, phosphate buffered saline (PBS), or the same formulation the protein had been in prior to lyophilization.

[0327] The compositions of the present invention can be administered to the subject at a suitable dose which can be determined e.g. by dose escalating studies by administration of increasing doses of the antibody construct of the invention exhibiting cross-species specificity described herein to non-chimpanzee primates, for instance macaques. As set forth above, the antibody construct of the invention exhibiting cross-species specificity described herein can be advantageously used in identical form in preclinical testing in non-chimpanzee primates and as drug in humans. The dosage regimen will be determined by the attending physician and clinical factors. As is well known in the medical arts, dosages for any one patient depend upon many factors, including the patient's size, body surface area, age, the particular compound to be administered, sex, time and route of administration, general health, and other drugs being administered concurrently.

[0328] The term “effective dose” or “effective dosage” is defined as an amount sufficient to achieve or at least partially achieve the desired effect. The term “therapeutically effective dose” is defined as an amount sufficient to cure or at least partially arrest the disease and its complications in a patient already suffering from the disease. Amounts or doses effective for this use will depend on the condition to be treated (the indication), the delivered antibody construct, the therapeutic context and objectives, the severity of the disease, prior therapy, the patient's clinical history and response to the therapeutic agent, the route of administration, the size (body weight, body surface or organ size) and/or condition (the age and general health) of the patient, and the general state of the patient's own immune system. The proper dose can be adjusted according to the judgment of the attending physician such that it can be administered to the patient once or over a series of administrations, and in order to obtain the optimal therapeutic effect.

[0329] A typical dosage may range from about 0.1 μg/kg to up to about 30 mg/kg or more, depending on the factors mentioned above. In specific embodiments, the dosage may range from 1.0 μg/kg up to about 20 mg/kg, optionally from 10 μg/kg up to about 10 mg/kg or from 100 μg/kg up to about 5 mg/kg.

[0330] A therapeutic effective amount of an antibody construct of the invention preferably results in a decrease in severity of disease symptoms, an increase in frequency or duration of disease symptom-free periods or a prevention of impairment or disability due to the disease affliction. For treating target cell antigen-expressing tumors, a therapeutically effective amount of the antibody construct of the invention, e.g. an anti-target cell antigen/anti-CD3 antibody construct, preferably inhibits cell growth or tumor growth by at least about 20%, at least about 40%, at least about 50%, at least about 60%, at least about 70%, at least about 80%, or at least about 90% relative to untreated patients. The ability of a compound to inhibit tumor growth may be evaluated in an animal model predictive of efficacy

[0331] The pharmaceutical composition can be administered as a sole therapeutic or in combination with additional therapies such as anti-cancer therapies as needed, e.g. other proteinaceous and non-proteinaceous drugs. These drugs may be administered simultaneously with the composition comprising the antibody construct of the invention as defined herein or separately before or after administration of said antibody construct in timely defined intervals and doses.

[0332] The term “effective and non-toxic dose” as used herein refers to a tolerable dose of an inventive antibody construct which is high enough to cause depletion of pathologic cells, tumor elimination, tumor shrinkage or stabilization of disease without or essentially without major toxic effects. Such effective and non-toxic doses may be determined e.g. by dose escalation studies described in the art and should be below the dose inducing severe adverse side events (dose limiting toxicity, DLT).

[0333] The term “toxicity” as used herein refers to the toxic effects of a drug manifested in adverse events or severe adverse events. These side events might refer to a lack of tolerability of the drug in general and/or a lack of local tolerance after administration. Toxicity could also include teratogenic or carcinogenic effects caused by the drug.

[0334] The term “safety”, “in vivo safety” or “tolerability” as used herein defines the administration of a drug without inducing severe adverse events directly after administration (local tolerance) and during a longer period of application of the drug. “Safety”, “in vivo safety” or “tolerability” can be evaluated e.g. at regular intervals during the treatment and follow-up period. Measurements include clinical evaluation, e.g. organ manifestations, and screening of laboratory abnormalities. Clinical evaluation may be carried out and deviations to normal findings recorded/coded according to NCI-CTC and/or MedDRA standards. Organ manifestations may include criteria such as allergy/immunology, blood/bone marrow, cardiac arrhythmia, coagulation and the like, as set forth e.g. in the Common Terminology Criteria for adverse events v3.0 (CTCAE). Laboratory parameters which may be tested include for instance hematology, clinical chemistry, coagulation profile and urine analysis and examination of other body fluids such as serum, plasma, lymphoid or spinal fluid, liquor and the like. Safety can thus be assessed e.g. by physical examination, imaging techniques (i.e. ultrasound, x-ray, CT scans, Magnetic Resonance Imaging (MRI), other measures with technical devices (i.e. electrocardiogram), vital signs, by measuring laboratory parameters and recording adverse events. For example, adverse events in non-chimpanzee primates in the uses and methods according to the invention may be examined by histopathological and/or histochemical methods.

[0335] The above terms are also referred to e.g. in the Preclinical safety evaluation of biotechnology-derived pharmaceuticals S6; ICH Harmonised Tripartite Guideline; ICH Steering Committee meeting on Jul. 16, 1997.

[0336] Finally, the invention provides a kit comprising an antibody construct of the invention or produced according to the process of the invention, a pharmaceutical composition of the invention, a polynucleotide of the invention, a vector of the invention and/or a host cell of the invention.

[0337] In the context of the present invention, the term “kit” means two or more components—one of which corresponding to the antibody construct, the pharmaceutical composition, the vector or the host cell of the invention—packaged together in a container, recipient or otherwise. A kit can hence be described as a set of products and/or utensils that are sufficient to achieve a certain goal, which can be marketed as a single unit.

[0338] The kit may comprise one or more recipients (such as vials, ampoules, containers, syringes, bottles, bags) of any appropriate shape, size and material (preferably waterproof, e.g. plastic or glass) containing the antibody construct or the pharmaceutical composition of the present invention in an appropriate dosage for administration (see above). The kit may additionally contain directions for use (e.g. in the form of a leaflet or instruction manual), means for administering the antibody construct of the present invention such as a syringe, pump, infuser or the like, means for reconstituting the antibody construct of the invention and/or means for diluting the antibody construct of the invention.

[0339] The invention also provides kits for a single-dose administration unit. The kit of the invention may also contain a first recipient comprising a dried/lyophilized antibody construct and a second recipient comprising an aqueous formulation. In certain embodiments of this invention, kits containing single-chambered and multi-chambered pre-filled syringes (e.g., liquid syringes and lyosyringes) are provided.

[0340] It must be noted that as used herein, the singular forms “a”, “an”, and “the”, include plural references unless the context clearly indicates otherwise. Thus, for example, reference to “a reagent” includes one or more of such different reagents and reference to “the method” includes reference to equivalent steps and methods known to those of ordinary skill in the art that could be modified or substituted for the methods described herein.

[0341] Unless otherwise indicated, the term “at least” preceding a series of elements is to be understood to refer to every element in the series. Those skilled in the art will recognize, or be able to ascertain using no more than routine experimentation, many equivalents to the specific embodiments of the invention described herein. Such equivalents are intended to be encompassed by the present invention.

[0342] The term “and/or” wherever used herein includes the meaning of “and”, “or” and “all or any other combination of the elements connected by said term”.

[0343] The term “about” or “approximately” as used herein means within 20%, preferably within 10%, and more preferably within 5% of a given value or range. It includes, however, also the concrete number, e.g., about 20 includes 20.

[0344] The term “less than” or “greater than” includes the concrete number. For example, less than 20 means less than or equal to. Similarly, more than or greater than means more than or equal to, or greater than or equal to, respectively.

[0345] Throughout this specification and the claims which follow, unless the context requires otherwise, the word “comprise”, and variations such as “comprises” and “comprising”, will be understood to imply the inclusion of a stated integer or step or group of integers or steps but not the exclusion of any other integer or step or group of integer or step. When used herein the term “comprising” can be substituted with the term “containing” or “including” or sometimes when used herein with the term “having”.

[0346] When used herein “consisting of” excludes any element, step, or ingredient not specified in the claim element. When used herein, “consisting essentially of” does not exclude materials or steps that do not materially affect the basic and novel characteristics of the claim.

[0347] In each instance herein any of the terms “comprising”, “consisting essentially of” and “consisting of” may be replaced with either of the other two terms.

[0348] It should be understood that this invention is not limited to the particular methodology, protocols, material, reagents, and substances, etc., described herein and as such can vary. The terminology used herein is for the purpose of describing particular embodiments only, and is not intended to limit the scope of the present invention, which is defined solely by the claims.

[0349] All publications and patents cited throughout the text of this specification (including all patents, patent applications, scientific publications, manufacturer's specifications, instructions, etc.), whether supra or infra, are hereby incorporated by reference in their entirety. Nothing herein is to be construed as an admission that the invention is not entitled to antedate such disclosure by virtue of prior invention. To the extent the material incorporated by reference contradicts or is inconsistent with this specification, the specification will supersede any such material.

[0350] A better understanding of the present invention and of its advantages will be obtained from the following examples, offered for illustrative purposes only. The examples are not intended to limit the scope of the present invention in any way.

### Example 1: BiTE® Induced CD69 Expression on T Cells in Absence of Target Cells

[0351] Isolated PBMC from healthy human donors were cultured with increasing CDH19/CD3 or MSLN/CD3 HLE bispecific antibody constructs for 48 h. The expression of the activation marker CD69 on T cells was determined by immunostaining and flow cytometry and antigen specific conjugates mAb.

[0352] Target-independent T cell activation in terms of CD69 upregulation was observed for all anti-CDH 19 constructs but was most pronounced for heteroFc and crossbody molecules. Upregulation of CD69 by antiCDH19-scFc occurred at higher concentrations and the amplitude was in part lower compared to the other two Fc-based constructs.

[0353] For the anti-MSLN almost no target-independent T cell activation was observed for the scFc-containing molecule, while the heteroFc construct induced a strong upregulation of CD69 on the cell surface T cells in the absence of target cells.

[0354] Target-independent T cell activation induced by BiTE® constructs containing a single chain-Fc, or hetero-Fc fusion at the C-terminus was evaluated for the following constructs: BiTE® constructs (serial dilutions: 0.1 pM-2 μM)
[0355] a. MSLN scFc; 1.14 mg/mL;
[0356] b. MSLN Hetero Fc; 1.02 mg.

[0357] Human PBMC effector cells (3 donors; #065, #823, #836 (scFc) #401, #415, #433 (heteroFc); #590, #595, 598, #605 (X-body)).

[0358] 48 h incubation time.

[0359] Determination of CD69 expression on CD4+ and CD8+ T cells with flow cytometer and antigen-specific conjugates mAb. Results see FIGS. 2A-2B.

[0360] Target-independent T cell activation induced by BiTE® antibody constructs containing a single chain-Fc, hetero-Fc or crossbody fusion at the C-terminus was evaluated for the following constructs:

[0361] BiTE® antibody constructs (serial dilutions: 0.1 pM-2 μM)
[0362] c. CDH19 scFc; 245.3 μg/mL
[0363] d. CDH-19 Hetero Fc; 1 mg/mL
[0364] e. CDH19 Xbody; 6.3 mg/mL

[0365] Human PBMC effector cells (3 to 4 donors; #386, #392, #401 (scFc) #282, #284, #287 (heteroFc)).

[0366] 48 h incubation time.

[0367] Determination of CD69 expression on CD4+ and CD8+ T cells with flow cytometer and antigen-specific conjugates mAb. Results see FIGS. 3A-3AB.

[0368] Target-independent T cell activation in terms of CD69 upregulation was observed for several bispecific constructs tested in these assays. The CD69 upregulation was in general more pronounced for the canonical BiTE® antibody constructs, heteroFc and crossbody molecules when compared to the respective scFc constructs. Upregulation of CD69 by the scFc constructs occurred in general at slightly higher concentrations and the amplitude was in part lower compared to the other two Fc-based constructs.

[0369] For the anti-CDH19 scFc construct no target-independent T cell activation was observed, while the heteroFc and X-Body constructs induced a strong upregulation of CD69 on the cell surface of T cells in the absence of target cells.

[0370] In addition, no target cell-independent upregulation of CD69 was observed in assays using anti-CD33 and anti-Flt-3 constructs. Due to the expression of the target on cells of the myeloid lineage, these cells had been removed prior to assay set up. These data indicate that an interaction of the Fc regions of the bispecific constructs with FcγR-expressing cells might be responsible for the target-independent induction of CD69 on T cells.

[0371] The strong upregulation of CD69 on T cells by the anti-CD70-scFc construct in the absence of a tumor cell lines is due to the expression of CD70 on T cells.

### Materials and Methods

[0372] 1. CD19

[0373] Target-independent T cell activation induced by a BiTE® antibody constructs containing a single chain-Fc for the following construct:
[0374] 1. BiTE® antibody construct (serial dilutions: 1.3 pM-20 nM)
   [0375] 1. CD19-scFc
[0376] 2. Human PBMC effector cells (3 donors)
[0377] 3. 48 h incubation time
[0378] 4. Flow cytometric analysis of CD69 expression on CD4+ and CD8+ T cells using a PE-Cy7 conjugated mAb specific for CD69.

[0379] 2. CD20

[0380] Target-independent T cell activation induced by BiTE® antibody constructs containing a single chain-Fc, hetero-Fc or crossbody fusion at the C-terminus was evaluated for the following constructs:
[0381] 1. BiTE® antibody constructs (serial dilutions: 1.3 pM-20 nM)
   [0382] 1. CD20-hetFc (hetero-Fc)
   [0383] 2. CD20-scFc
   [0384] 3. CD20-X-Body (CD20 Crossbody)
[0385] 2. Human PBMC effector cells (3 donors)
[0386] 3. 48 h incubation time
[0387] 4. Flow cytometric analysis of CD69 expression on CD4+ and CD8+ T cells using a PE-Cy7 conjugated mAb specific for CD69.

[0388] 3. CD33

[0389] Target-independent T cell activation induced by BiTE® antibody constructs containing a single chain-Fc, hetero-Fc or crossbody fusion at the C-terminus was evaluated for the following constructs:
[0390] 1. BiTE® antibody constructs (serial dilutions: 1.3 pM-20 nM)
   [0391] 1. CD33-canonical
   [0392] 2. CD33-scFc
   [0393] 3. CD33-hetFc
   [0394] 4. CD33-X-Body
[0395] 2. Human PBMC effector cells (3 donors)
[0396] 3. 48 h incubation time
[0397] 4. Flow cytometric analysis of CD69 expression on CD4+ and CD8+ T cells using a PE-Cy7 conjugated mAb specific for CD69.

[0398] 4. CDH19

[0399] Target-independent T cell activation induced by BiTE® antibody constructs containing a single chain-Fc, hetero-Fc or crossbody fusion at the C-terminus was evaluated for the following constructs:
[0400] 1. BiTE® antibody constructs (serial dilutions: 1.3 pM-20 nM)
   [0401] 1. CDH19-scFc
   [0402] 2. CDH19-hetFc
   [0403] 3. CDH19-X-Body
[0404] 2. Human PBMC effector cells (3 donors)
[0405] 3. 48 h incubation time
[0406] 4. Flow cytometric analysis of CD69 expression on CD4+ and CD8+ T cells using a PE-Cy7 conjugated mAb specific for CD69.

[0407] 5. MSLN

[0408] Target-independent T cell activation induced by BiTE® antibody constructs containing a single chain-Fc, hetero-Fc or crossbody fusion at the C-terminus was evaluated for the following constructs:
[0409] 1. BiTE® antibody constructs (serial dilutions: 1.3 pM-20 nM)
   [0410] 1. MSLN-scFc
   [0411] 2. MSLN-hetFc
   [0412] 3. MSLN-X-Body
[0413] 2. Human PBMC effector cells (3 donors)
[0414] 3. 48 h incubation time
[0415] 4. Flow cytometric analysis of CD69 expression on CD4+ and CD8+ T cells using a PE-Cy7 conjugated mAb specific for CD69.

[0416] 6. EGFRvIII

[0417] Target-independent T cell activation induced by BiTE® antibody constructs containing a single chain-Fc or a hetero-Fc was evaluated for the following constructs:
[0418] 1. BiTE® antibody constructs (serial dilutions: 1.3 pM-20 nM)
   [0419] 1. EGFRvIII-canonical
   [0420] 2. EGFRvII-scFc
   [0421] 3. EGFRvIII-hetFc
[0422] 2. Human PBMC effector cells (3 donors)
[0423] 3. 48 h incubation time
[0424] 4. Flow cytometric analysis of CD69 expression on CD4+ and CD8+ T cells using a PE-Cy7 conjugated mAb specific for CD69.

[0425] 7. DLL3

[0426] Target-independent T cell activation induced by BiTE® antibody constructs containing a single chain-Fc or a hetero-Fc was evaluated for the following constructs:
[0427] 1. BiTE® antibody constructs (serial dilutions: 1.3 pM-20 nM)
   [0428] 1. DLL3-canonical
   [0429] 2. DLL3-scFc
   [0430] 3. DLL3-hetFc
[0431] 2. Human PBMC effector cells (3 donors)
[0432] 3. 48 h incubation time
[0433] 4. Flow cytometric analysis of CD69 expression on CD4+ and CD8+ T cells using a PE-Cy7 conjugated mAb specific for CD69.

[0434] 8. CD70

[0435] Target-independent T cell activation induced by a BiTE® antibody constructs containing a single chain-Fc was evaluated for the following construct:
[0436] 1. BiTE® antibody construct (serial dilutions: 1.3 pM-20 nM)
   [0437] 1. CD70-scFc
[0438] 2. Human PBMC effector cells (3 donors)
[0439] 3. 48 h incubation time
[0440] 4. Flow cytometric analysis of CD69 expression on CD4+ and CD8+ T cells using a PE-Cy7 conjugated mAb specific for CD69.

[0441] 9. FLT3

[0442] Target-independent T cell activation induced by a BiTE® antibody constructs containing a single chain-Fc was evaluated for the following construct:
[0443] 1. BiTE® antibody construct (serial dilutions: 1.3 pM-20 nM)
   [0444] 1. FLT3-scFc
[0445] 2. Human PBMC effector cells (3 donors; CD14+/CD33⁺ cell depelted)
[0446] 3. 48 h incubation time
[0447] 4. Flow cytometric analysis of CD69 expression on CD4+ and CD8+ T cells using a PE-Cy7 conjugated mAb specific for CD69.

### Example 2

[0448] Purified BiTE® antibody constructs were coated on a Maxisorb Plate in decreasing concentration (100 nM, 1:4 dilutions). After 3× washing with PBS-T and blocking with PBS/3% (w/v) BSA (60 min, 37° C.), pooled human plasma was incubated for 60 min, 80 rpm at room temperature. After 3× washing a mouse monoclonal antibody specific for human C1q subunit A (CC1q) was added (Thermo MA1-83963, 1:500) for 60 min, 80 rpm, room temperature, after described washing steps a goat anti mouse Fc-POX mAb (1:5,000) was incubated for 60 min, 80 rpm, room temperature. After additional washing, TMB substrate was incubated and stopped after colorimetric reaction by addition of H₂SO₄. The absorption was determined at 450 nm.

[0449] Result: As shown in FIG. 4 at high concentrations, the BiTE® hetero Fc antibody construct (squares) showed higher binding signals for human CC1q compared to a BiTE® single chain Fc antibody construct (triangle). As a negative control a canonical BiTE® (circle) was used, which showed no significant CC1q binding.

### Example 3: Pharmacokinetics of BiTE® Antibody Constructs Fused to Half-Life Extension Modalities

[0450] Various target binding BiTE® antibody constructs were fused to four different half-life extending moieties. All different HLE-variants available per BiTE® antibody construct were tested in the cynomolgus monkey in the context of pharmacokinetic (PK) studies They are subsequently named as BiTE®-scFc, BiTE®-hetFc, BiTE®-HALB, BiTE®-Xbody as well as canonical BiTE®, according to the half-life extension modality attached to the target binder. The corresponding nomenclature of these molecules is briefly summarized in table 4 below.

TABLE 4
Compound nomenclature
of single dosed BiTE ®
antibody constructs

| | test |
|---|---|
| compound | compound |
| synonyme | name |
| Compound 1a | CD33-scFc |
| Compound 1b | CD33-hetFc |
| Compound 1c | CD33-HALB |
| Compound 2a | MSLN-scFc |
| Compound 2b | MSLN-hetFc |
| Compound 2c | MSLN-HALB |
| Compound 2d | MSLN-Xbody |
| Compound 3a | CDH19-scFc |
| Compound 3b | CDH19-hetFc |
| Compound 3c | CDH19-HALB |
| Compound 3d | CDH19-H6 |
| Compound 4a | CD20-scFc |
| Compound 4b | CD20-hetFc |
| Compound 5a | DLL3-scFc |
| Compound 5b | DLL3-hetFc |
| Compound 5c | DLL3-HALB |
| Compound 6a | EGFRvIIIcc-scFc |
| Compound 6b | EGFRvIIIcc-HALB |
| Compound 7 | FLT3-scFc |
| Compound 8 | CD70-scFc |
| Compound 9 | CD19cc-scFc |

[0451] The BiTE®-HLE antibody constructs were administered as intravenous bolus (compounds 1b, 2a-d, 3a/b, 4a/b, 5a-5c, 7-9) and intravenous infusion (compounds 1a, 1c, 3c/d, 6a/b, each as a 30 min infusion). The BiTE® antibody constructs were administered in a dose-linear, pharmacokinetic relevant range of 3 μg/kg to 6 μg/kg, 12 μg/kg and 15 μg/kg, respectively.

[0452] For reasons of comparability the serum concentrations shown are dose-normalized and molecular weight-normalized (described in nmol).

[0453] For each of the above named compounds a group of at least two to three animals was used. Blood samples were collected and serum was prepared for determination of serum concentrations. Serum BiTE® antibody construct levels were measured using an immunoassay. The assay is performed by capturing the BiTE® antibody construct via its target moiety, while an antibody directed against the CD3-binding part of the construct was used for detection. The serum concentration-time profiles were used to determine PK parameters.

[0454] The appropriate study set-up was adjusted to the characteristics of the BiTE® antibody constructs. Either a 1-week- or a 2-weeks duration. Blood sampling time points could slightly vary and are listed for both set-ups in Table 5 below.

TABLE 5
Blood sampling time points during
PK studies. Time points could vary
between single studies. Time points
labelled with an asterisk were
mandatory and common for all studies

| blood sampling | blood sampling |
|---|---|
| time points: | time points: |
| 1-week study | 2-week study |
| duration | duration |
| [h] | [h] |
| 0.05/0.085* | 0.05/0.085* |
| 0.25 | 0.25 |
| 0.5 | 0.5 |
| 1 | 1 |
| 2 | 2 |
| 4* | 4* |
| 8 | 8 |
| 16 | 16 |
| 24* | 24* |
| 48* | 48* |
| 72* | 72* |
| 96 | 96 |
| 120 | 120 |
| 144 | 144 |
| 168* | 168* |
| | 216 |
| | 240 |
| | 264 |
| | 336* |

[0455] The pharmacokinetics of sixteen BiTE®-HLE antibody constructs are shown exemplarily. Each compound group stands for the same BiTE® antibody construct fused to either a scFc-, a hetFc, a HSA (human albumin) or a Crossbody-Fc format. For all proteins serum levels were quantifiable for all time points in all animals after BiTE®-HLE antibody construct administration. The PK profiles describe a biphasic, exponential decline after each of the single test item administrations (FIGS. 5A-5E).

[0456] The pharmacokinetic parameters were determined using standard non-compartmental analysis (NCA) methods. Using non-compartmental analysis, the following PK parameters were estimated: AUCinf (Area under the serum concentration-time curve), Vss (volume of distribution at steady state), CL (systemic clearance) and terminal t1/2 (terminal half-life).

[0457] The PK parameter for each tested compound are summarized as mean of n=2 and n=3, respectively in Table 6 below.

TABLE 6
Pharmacokinetic parameter of various
HLE variants from different BiTE ®-
target binders in cynomolgus monkeys.

| | | AUC_{inf} | | |
|---|---|---|---|---|
| | | [normalized | | |
| | terminal | to | | |
| | t_{1/2} | 15 μg/kg] | Cl | Vss |
| test item | [h] | [h*ng/mL] | [mL/h/kg] | [mL/kg] |
| Compound 1a | 167 | 9981 | 1.4 | 256 |
| Compound 1b | 95 | 6159 | 2.4 | 235 |
| Compound 1c | 47 | 4498 | 3.3 | 161 |
| Compound 2a | 213 | 41173 | 0.4 | 89 |
| Compound 2b | 116 | 18745 | 0.8 | 78 |
| Compound 2c | 77 | 28928 | 1.0 | 65 |
| Compound 2d | 77 | 9825 | 1.5 | 112 |
| Compound 3a | 61 | 4109 | 3.7 | 129 |
| Compound 3b | 59 | 4561 | 3.3 | 78 |
| Compound 3c | 51 | 2769 | 6.8 | 299 |
| Compound 3d | 3 | 510 | 30.0 | 653 |
| Compound 4a | 97 | 7816 | 1.9 | 181 |
| Compound 4b | 62 | 3606 | 4.2 | 292 |
| Compound 5a | 234 | 30954 | 0.5 | 144 |
| Compound 5b | 173 | 18299 | 0.8 | 166 |
| Compound 5c | 142 | 26418 | 0.6 | 103 |
| Compound 6a | 97 | 15854 | 1.0 | 103 |
| Compound 6b | 48 | 77271 | 1.0 | 64 |
| Compound 7 | 64 | 1971 | 7.6 | 395 |
| Compound 8 | 122 | 17093 | 0.9 | 119 |
| Compound 9 | 210 | 6729 | 2.2 | 540 |

[0458] Overall, the AUC_{inf} for the different BiTE® target binders fused to either a scFc-, a hetFc, a HSA- and a crossbody HLE-modality, respectively, ranged between 1971 h*ng/mL and 77271 h*ng/mL, depending on the BiTE® target context. All analyzed HLE fusions achieved systemic clearance values of 0.4 to 7.6 mL/h/kg. The corresponding volumes of distribution ranged between 64 and 540 mL/kg. Compound 3d, the canonical, non-half-life extended compound 3 BiTE® target binder, is included as a reference. Non-half-life extended BiTE® antibody constructs show high clearances, low serum exposures and as a consequence a short terminal half-life. A comparison of terminal-half-lifes by modality is summarized in table 7.

TABLE 7
Comparison of terminal-half-
lifes by modality investigated
in cynomolgus monkeys.

| | terminal |
|---|---|
| | t_{1/2} |
| HLE modality | [h] |
| Canonical BiTE ® | 3 |
| BiTE ®-scFc | 61-234 |
| BiTE ®-hetFc | 48-173 |
| BiTE ®-HALB | 47-142 |
| BiTE ®-Crossbody | 77 |

[0459] Investigating up to four different half-life-extending (HLE) moieties per targeting BiTE® it becomes clear that the -scFc moiety shows an increase of t_{1/2} compared to corresponding other half-life extension moiety after single low dose administration at 6, 10, 12 and 15 μg/kg (see FIG. 6).

### Example 4

[0460] Preformulated drug substances containing purified MSLN-hALB, MSLN-hFc, and MSLN-scFc respectively were buffer exchanged via ultrafiltration/diafiltration using membranes with a molecular weight cut-off (MWCO) of 10 kDa. Final formulation was achieved by adding concentrated stock solutions. Resulting formulations for each construct are listed in Table 8. The target protein concentration was 1.0 mg/mL. Formulated MSLN constructs were filled to 1 mL in type I glass vials which were stoppered with butyl rubber stoppers and crimped with aluminum seals. Filled vials were incubated at −20, 5, 25 and 37° C. One vial of each version was subjected to five freeze and thaw (F/T) cycles. Target freezing temperature was −29° C. Target thawing temperature was 2° C. The ramp rate was approximately 0.3 K/min.

[0461] Visual particles were assessed in accordance to the method described by Ph Eur 2.9.20 by trained operators. Visual particle counts per vial are depicted in Table 8. The number of visual (larger than 125 μm) proteinaceous particles was higher for MSLN-hFc if compared to both MSLN-hALB and MSLN-scFc.

[0462] The samples described above were also analyzed by size exclusion ultra-high performance chromatography (SE-UPLC) in order to quantify the percentaged content of high molecular weight species (HMWS). SE-UPLC was performed on an AcquityH-Class UPLC system (Waters) using an Acquity UPLC BEH200 SEC 150 mm column (Waters). Column temperature was set to 25° C. Separation of size variants was achieved by applying an isocratic method with a flow rate of 0.4 mL/min. The mobile phase was composed of 100 mM sodium phosphate, 250 mM NaCl at pH 6.8. The run time totals 6.0 minutes. Samples were held at 8° C. within the autosampler until analysis. A total amount of 3 μg protein was injected. In order to avoid carry over an intermediate injection with 40% acetonitrile was performed after each sample. Detection was based on fluorescence emission (excitation at 280 nm, emission at 325 nm). Peak integration was performed using Empower® software. Relative area under the curve of HMWS was reported (Table 9).

[0463] Fc based constructs exhibited lower HMWS contents in the formulation variant G40MSuT than in K60RTrT independent on the stress condition. It became evident that MSLN-scFc contained less HMWS than MSLN-hFc in both G40MSuT as well as K60RTrT preparations. MSLN-scFc in its preferred formulation (G40MSuT) was less prone to HMWS formation than MSLN-hALB formulated in K60RTrT. In previous experiments this buffer showed improved stabilizing potential for hALB based constructs.

[0464] The abundance of chemical modifications upon heat stress (incubation at 37° C.) was monitored by peptide mapping. Protein samples were enzymatically digested and the resulting peptides were separated using reversed phase chromatography. The column eluate was directly injected into the ion source of a mass spectrometer for identification and quantitation of the peptides.

[0465] In order to achieve maximum coverage, two separate enzyme digests were performed: once with trypsin and once with chymotrypsin. In each case, the proteins were denatured with guanidinum chloride and then reduced with dithiothreitol (DTT). After incubation in DTT, free cysteine residues were alkylated by the addition of iodoacetic acid. Samples were then buffer exchanged into 50 mM Tris pH 7.8 for digestion. Trypsin and chymotrypsin were added to separate reaction tubes at a ratio of 1:10 (sample:enzyme) each. Samples were digested for 30 min at 37° C. and the reaction was quenched by adding trifluoroacetic acid.

[0466] A load of 5 μg of each digest was separately injected onto a Zorbax SB-C18 (Agilent #859700-902) reversed phase column equilibrated in 0.1% (V/V) formic acid (FA). A 156 minutes gradient of up to 90% acetonitrile containing 0.1% FA was used to elute the peptides directly into the electrospray ion source of a Q-Exactive Plus mass spectrometer (Thermo Scientific). Data was collected in data dependent mode using a top 12 method in which a full scan (resolution 70 000; scan range 200-2000 m/z) was followed by high energy collision dissociation (HCD) of the 12 most abundant ions (resolution 17 500).

[0467] Peptides were identified based on accurate mass and tandem mass spectrum using in-house software. Identifications were manually verified. Relative quantities of modified and unmodified peptides were calculated based on ion abundance using Pinpoint software (Thermo Scientific).

[0468] Percentages of chemical modifications of the complement determining regions (CDRs) and of the half-life extending portion (either hALB or Fc) detected in MSLN-hALB, -hFc, and -scFc preparations are given by Table 10. When comparing similar formulation conditions, it became obvious that overall, chemical modifications were least abundant in scFc constructs.

### Example 5

[0469] MSLN-hALB, -hFc, -scFc formulated as described under Example 4 were subjected to a pH jump experiment. The concentration of the starting materials was 1.0 mg/mL. A volume of 0.38 mL of each starting material was filled in a glass vial. After preconditioning at 37° C. the solutions were spiked with 20 fold phosphate buffered saline (PBS) which was composed of 0.090 M potassium phosphate, 0.480 M sodium phosphate (both dibasic), 0.052 M potassium chloride and 2.76 M NaCl. The spiked samples were incubated at 37° C. for two weeks. After incubation they were analyzed by SE-UPLC using the method described under Example 4 and the percentaged content of HMWS was reported (Table 11). When comparing all constructs formulated in K60RTrT the HMWS content increased in the following order: hALB<scFc<hFc. MSLN-scFc also showed a lower HMWS content than MSLN-hFc when formulated in G40MSuT.

### Example 6

[0470] MSLN-hALB, -hFc, and -scFc formulated as described under Example 4 were subjected to agitation stress. The concentration of the starting materials was 1.0 mg/mL. A volume of 0.5 mL of each solution was filtered through an appropriate 0.22 μm filter and filled into 3cc glass vials. The vials were placed in a plastic box ensuring that the vials were not displaced within the box during agitation. The box was placed onto an orbital shaker. The samples were agitated at 500 rpm for 65 hours. Visual particles were assessed in accordance to the method described by Ph Eur 2.9.20. The method was conducted by trained operators. Visual particle counts per vial are depicted in Table 12. Visible proteinaceous particles were only observed in MSLN-hFc preparations.

[0471] Above samples were also analyzed by size exclusion ultra-high performance chromatography (SE-UPLC) in order to quantify the percentaged content of high molecular weight species (HMWS). The same method as described in Example 4 was applied. The HMWS contents of agitated samples are outlined by Table 13. The formation of HMWS was most pronounced in MSLN-hFc when comparing K60RTrT preparations. HMWS were more abundant in MSLN-hFc than in MLSN-scFc.

### Example 7

[0472] MSLN-hALB, -hFc, and -scFc formulated as described under Example 4 were exposed to visible and UVA light (photo stress). Protein concentration totaled 1 mg/mL in all preparations. Protein solutions were filtered through a filter with 0.22 μm pore size and filled 10 to 0.5 mL in type I glass vials. MSLN-hALB and -scFc were subjected to two different tests including 0.2 MLux visible light/25 W*h/m² UVA light and 1.2MLux visible light/173 W*h/m² respectively. MSLN-hFc was subjected to two different tests including 0.2 MLux visible light without UVA light and 1.2 MLux visible light/30 W*h/m² UVA light respectively. Chamber temperatures were adjusted to 25° C. After light exposure samples were analyzed by visible inspection (Table 14), SE-UPLC (Table 15) and peptide map (Table 16). Aforementioned methods were performed according to the procedures described under Example 4. Although MSLN-hALB, and -scFc were exposed to higher doses of UVA light, no visible proteinaceous particles was observed whereas MSLN-hFc samples exhibited one visible proteinaceous particle per vial for both tests irrespective of the formulation.

[0473] HMWS increased in the following order MSLN-hALB<-scFc<-hFc when the protein was formulated in K60RTrT. HMWS could be reduced for Fc based constructs when formulated in G40MSuT. However HMWS were again less pronounced for MSLN-scFc. MSLN-hFc revealed to be especially sensitive towards UVA light exposure.

[0474] Percentages of chemical modifications of the complement determining regions (CDRs) and of the half-life extending portion (either hALB or Fc) detected in MSLN-hALB, -hFc, and -scFc preparations are given by Table 16. When comparing similar formulation conditions, it became obvious that overall, chemical modifications were least abundant in scFc constructs.

### Example 8

[0475] MSLN-hALB was formulated in K60RTrT and MSLN-scFc was formulated in G40MSuT according to the procedure described in Example 4. Protein concentrations totaled 0.05 mg/mL. Glass (borosilicate, type I, 13 mm 3cc vial from West, Art. No. 68000375) and polypropylene test containers (2 mL with O-ring, e.g. from Sarstedt, Art No. 72.694.005) are filled with 500 μL of the test solution. The test solution was left for five minutes in the first test container. Then a 150 μL aliquot was sampled for analysis. The remaining test solution (350 μL) was transferred sequentially from one test container to the next (five containers in total). In each vial, the solution was left for five minutes before the next transfer. The same pipette tip was used for each transfer step. The same test was performed using 30 mL polycarbonate bottles (Nalgene, PCS-000295 with closure, PP/20-415/ZTPE). For this container type the first container was filled with 5 mL. After a 150 μL aliquot was sampled, the residual volume was transferred from one test container to the next (according to the procedure described above). Samples pulled from container #1 and #5 were analyzed by SE-UPLC (method as described under Example 4). In addition protein detection was carried out with a PDA detector (280 nm) in order to determine protein concentrations. Percentaged protein recovery from each test container is given by Table 17. It was shown that protein recovery was more pronounced for MSLN-scFc than for MSLN-hALB irrespective of the container type.

### Example 9

[0476] MSLN-hALB was formulated in K60RTrT and MSLN-scFc was formulated in K60RTrT and G40MSuT according to the procedure described in Example 4. The protein concentration totaled 1.0 mg/mL. 1950 μL of each test solution was spiked with 50 μL of a 1000 ppm silicon standard solution (Specpure from AlfaAesar, Art.No. 38717) resulting in a 25 ppm spike. An unspiked test solution served as control sample. The spiked test solution as well as the control sample were filled into 3cc type I glass vials and were incubated at 37° C. for 24 hours. All samples were analyzed by SE-UPLC according to the method described in Example 4 in order to quantify the amount of HMWS (Table 18). When formulated in K60RTrT, MSLN-hALB and -scFc showed similar increases in HMWS upon silicon spiking.

### Example 10

[0477] Preformulated drug substances containing purified CD33cc-hALB, CD33cc-hFc, and CD33cc-scFc respectively were buffer exchanged via ultrafiltration/diafiltration using membranes with a molecular weight cut-off (MWCO) of 10 kDa. Final formulation was achieved by adding concentrated stock solutions. Resulting formulations for each construct are listed in Table 19. The target protein concentration was 1.0 mg/mL. Formulated CD33cc-constructs were filled to 1 mL in type I glass vials which were stoppered with butyl rubber stoppers and crimped with aluminum seals. Filled vials were incubated at −20, 5, 25 and 37° C. One vial of each version was subjected to five freeze and thaw (F/T) cycles. Target freezing temperature was −29° C. Target thawing temperature was 2° C. The ramp rate was approximately 0.3 K/min. The samples described above were also analyzed by size exclusion ultra-high performance chromatography (SE-UPLC) in order to quantify the percentage content of high molecular weight species (HMWS). SE-UPLC was performed according to the method described under Example 4. When formulated in K60RTrT, HMWS increased in the following order in unstressed samples: scFc<hALB<hFc. The least pronounced increase in HMWS upon freeze thaw stress was observed for the scFc-construct. The hFc-construct revealed to be most prone to HMWS formation at −20° C. HMWS contents increased after four weeks storage at 5° C. The HMWS formation under these conditions was more pronounced for Fc based constructs than for albumin based constructs. In K60RTrT no significant increases in HMWS were observed at elevated storage temperatures (25 and 37° C.). When formulated in G40MSuT, all constructs revealed similar HMWS contents in unstressed samples. The increase during freeze thaw was more distinct for Fc based constructs if compared to the albumin based construct. In G40MSuT, the hFc-construct was least stable during storage at −20° C. Considerable increases in HMWS during

[0478] The abundance of chemical modifications upon heat stress (incubation at 37° C.) was monitored by peptide mapping according to the method described in Example 4. Percentages of chemical modifications of the complement determining regions (CDRs) detected in CD33cc-hALB, -hFc, and -scFc preparations are given by Table 20. Overall, CD33cc-scFc exhibited the lowest amount of chemical modifications in the CDRs. It became evident that especially deamidations of the CDRs were least pronounced for the scFc construct.

### Example 11

[0479] CD33cc-hALB, -hFc, and -scFC formulated as described under Example 4 were subjected to a pH jump experiment. The concentration of the starting materials was 1.0 mg/mL. A volume of 0.38 mL of each starting material was filled in a glass vial. After preconditioning at 37° C. the solutions were spiked with 20 fold phosphate buffered saline (PBS) which was composed of 0.090 M potassium phosphate, 0.480 M sodium phosphate (both dibasic), 0.052 M potassium chloride and 2.76 M NaCl. The spiked samples were incubated at 37° C. for two weeks. After incubation they were analyzed by SE-UPLC using the method described under Example 4 and the percentaged content of HMWS was reported (Table 21). CD33cc-scFc constructs showed the lowest HMWS content after pH jump if compared to CD33cc-hALB and -hFc irrespective of the formulation.

### Example 12

[0480] CD33cc-hALB, -hFc, and -scFc formulated as described under Example 4 were subjected to agitation stress. The concentration of the starting materials was 1.0 mg/mL. A volume of 0.5 mL of each solution was filter through an appropriate 0.22 μm filter and filled into 3cc type I glass vials. The vials were placed in a plastic box ensuring that the vials were not displaced within the box during agitation. The box was placed onto an orbital shaker. The samples were agitated at 500 rpm for 65 hours. Samples were analyzed by SE-UPLC in order to quantify the percentaged content of high molecular weight species (HMWS). The same method as described in Example 4 was applied. The HMWS contents of agitated samples are outlined by Table 22. The formation of HMWS was least pronounced for CD33cc-scFc in either formulation.

### Example 13

[0481] CD33cc-hALB, -hFc, and -scFc formulated as described under Example 4 were exposed to visible and UVA light (photo stress). Protein concentration totaled 1 mg/mL in all preparations. Protein solutions were filtered through a filter with 0.22 μm pore size and filled to 0.5 mL in type I glass vials. CD33cc-hALB and -scFc were subjected to two different tests including 0.2 MLux visible light/25 W*h/m² UVA light and 1.2MLux visible light/173 W*h/m² respectively. CD33cc-hFc was subjected to two different tests including 0.2 MLux visible light without UVA light and 1.2 MLux visible light/30 W*h/m² UVA light respectively. Chamber temperatures were adjusted to 25° C. After light exposure samples were analyzed by SE-UPLC (Table 23) and peptide map (Table 24). Aforementioned methods were performed according to the procedures under Example 4. Despite of the higher UVA light intensity applied to CD33cc-scFc, this construct was stable against HMWS formation. In contrast, CD33cc-hFc and CD33cc-hALB showed an increase in HMWS upon test 2 conditions.

[0482] Overall chemical modifications upon light exposure were least pronounced for CD33cc-scFc. Especially deamidations of the CDRs were formed to a higher extent in CD3cc-hALB and CD33cc-hFc. When comparing Fc based constructs it was revealed that CD33cc-scFc was less prone to chemical modifications of the Fc portion although the scFc construct was exposed to higher UVA light doses than the hFc-construct. Table 24 also lists the most abundant chemical modifications of the albumin portion in CD33cc-hALB demonstrating that the half-life extending portion of this construct was chemically more degraded than the Fc portions of CD33cc-hFc and -scFc.

### Example 14

[0483] Different BiTE® antibody constructs designed for targeting EGFRvIII including EGFRvIII-non half-life extended (non HLE, canonical), EGFRvIII-hALB, and EGFRvII-scFc were examined. The target protein concentration was 1.0 mg/mL for the hALB and scFc and 0.4 mg/mL for the non HLE version. Formulated BiTE® antibody constructs were filled to 1 mL in type I glass vials which were stoppered with butyl rubber stoppers and crimped with aluminum seals. Filled vials were incubated at −20° C. and 37° C. (w/o and with 25 ppm silicon which is known for its potential to induce aggregation of proteins) for 4 weeks. Above constructs were also exposed to light (1.2 MLux visible light/173 W*h/m2 UVA light). For light stress, chamber temperature was set to 25° C. Samples stored at −70° C. served as controls (T0).

[0484] The samples described above were analyzed in duplicates by size exclusion ultra-high performance chromatography (SE-UPLC) in order to quantify the percentaged content of high molecular weight species (HMWS). SE-UPLC was performed on an Aquity H-Class UPLC system (Waters) using an Acquity UPLC BEH200 SEC 150 mm column (Waters). Column temperature was set to 25° C. Separation of size variants was achieved by applying an isocratic method with a flow rate of 0.4 mL/min. The mobile phase was composed of 100 mM sodium phosphate, 250 mM NaCl pH 6.8. The run time totals 6.0 minutes. Samples were held at 8° C. within the autosampler until analysis. A total amount of 3 μg protein was injected. In order to avoid carry over an intermediate injection with 40% ACN was performed after each sample. Detection was based on fluorescence (excitation at 280 nm, emission at 325 nm). Peak integration was performed using Empower@ software. Relative area under the curve of HMWS was reported (Table 25).

[0485] Within non-stressed samples, HMWS were least pronounced for the scFc-construct. HMWS formation was exclusively observed during 4 weeks storage at −20° C. The HMWS contents under these conditions increase in the following order scFc<hALB<non HLE.

TABLE 25
Overview on HMWS contents
in stressed and unstressed
(T0) EGFRvIII-non HLE,
-hALB, and -scFc preparations
determined via SE-UPLC.

| | Non | | |
|---|---|---|---|
| | HLE | | |
| Construct | (canonical) | hALB | scFc |
| T0 | 1.3% | 1.3% | 1.0% |
| 4 w −20° C. | 4.6% | 1.8% | 1.6% |
| 4 w 37° C. | 0.9% | 0.6% | 0.5% |
| 4 w 37° C. | 1.1% | 0.8% | 0.8% |
| (25 ppm silicon) | | | |
| Light exposure | 1.0% | 0.9% | 0.5% |

[0486] Additionally, samples derived from heat stress in absence and presence of silicon were assessed for the abundance of subvisible particles by Microfluid Imaging (MFI) using a Flowcam from Fluid Imaging Technologies, Inc. The instrument was equipped with a FC80FV flow cell. A tenfold optical magnification was applied. System suitability was verified with particle free water. An autoimage rate of 20 frames per second was applied. Dark and light thresholds were set to 25 and 20 pixels respectively. Sample volume for a single measurement totals 0.25 mL. Samples were measured in triplicates. Prior to each triplicate the system was flushed of 0.5 mL of the respective sample solutions. At the beginning and between each triplicate a wash with 1.0 mL particle free water was performed. Data evaluation was performed with Visual Spreadsheet software. Samples were measured in triplicates. Results are outlined in Table 26.

[0487] Heat stress resulted in subvisible particle formation in preparations containing non HLE and hALB constructs. In contrast, the scFc construct remained stable. Subvisible particle formation was not promoted by the addition of silicon independent on the nature of the BiTE® antibody construct.

TABLE 26
Assessment of subvisible particles by MFI in EGFRvIII-non HLE (canonical), -hALB,
and -scFc preparations after heat stress in absence and presence of silicon.

| Construct | Non HLE (canonical) | | | | hALB | | | | scFc | | | |
|---|---|---|---|---|---|---|---|---|---|---|---|---|
| Particle size [μm] | ≧2 | ≧5 | ≧10 | ≧25 | ≧2 | ≧5 | ≧10 | ≧25 | ≧2 | ≧5 | ≧10 | ≧25 |
| T0 | 146 | 35 | 12 | 0 | 281 | 71 | 35 | 0 | 298 | 150 | 33 | 0 |
| 4w 37° C. | 410 | 163 | 23 | 0 | 742 | 225 | 11 | 0 | 110 | 44 | 0 | 0 |
| 4w 37° C. | 69 | 35 | 11 | 0 | 272 | 91 | 34 | 0 | 146 | 55 | 11 | 0 |
| (25 ppm silicon) | | | | | | | | | | | | |

[0488] Samples from heat stress were also analyzed by Weak Cation Exchange (WCX) chromatography in order to quantify the percentaged content of charge variants using a UPLC Aquity H class from Waters. A Protein-Pak Hi Res CM 7im 4.6×100 mm column (Waters, cat No. 186004929) was applied. The column temperature was adjusted to 30° C. The flow rate was set to 0.65 mL/min. The applied gradient was designed as follows (Table 27). The temperature of the autosampler was kept at 2-8° C.

TABLE 27
Gradient applied for WCX chromatography

| | | % B |
|---|---|---|
| | | 20 mM sodium |
| | % A | phosphate, |
| Time | 20 mM sodium | 250 mM sodium |
| [min:sec] | phosphate, pH 6.5 | chloride, pH 6.5 |
| 00:00 | 100 | 0 |
| 04:00 | 100 | 0 |
| 25:00 | 50 | 50 |
| 25:01 | 0 | 100 |
| 29:00 | 0 | 100 |
| 29:01 | 100 | 0 |
| 33:00 | 100 | 0 |

[0489] A total amount of 3 μg of protein was injected. Detection was based on fluorescence (excitation at 280 nm, emission at 325 nm). Peak integration was performed using Empower® software. Relative areas under the curve of the main peak as well as of acidic and basic charge variants was reported (Table 28).

[0490] Heat stress resulted in a reduced main peak percentage which had to be attributed to a predominant formation of acidic charge variants. The loss in main peak percentage was least pronounced for the scFc construct (7.5%). Basic charge variants were formed in both constructs with extended half-life upon light exposure. The increase in basic charge variants ranged between 5 and 6% in hALB and scFc constructs.

TABLE 28
Assessment of charge variants by WCX chromatography in EGFRvIII-non HLE (canonical),
-hALB, and -scFc preparations after heat and light induced stress.

| | Non HLE (canonical) | | | hALB | | | scFc | | |
|---|---|---|---|---|---|---|---|---|---|
| Construct | % | % | % | % | % | % | % | % | % |
| Fraction | main | acidics | basics | main | acidics | basics | main | acidics | basics |
| T0 | 89.9 | 3.6 | 6.5 | 83.3 | 0.7 | 16.0 | 74.5 | 3.4 | 22.1 |
| 4w 37° C. | 79.3 | 11.1 | 9.5 | 75.6 | 9.8 | 14.6 | 67.0 | 11.2 | 21.8 |

[0491] In addition, sample purity was quantified in heat and light stressed samples using a microfluidic capillary electrophoresis sodium dodecylsulphate (CE-SDS) assay based on the LabChip GXII system (Perkin Elmer). The sample denaturing solution was composed of the HT Protein Express Sample Buffer (provided by Perkin Elmer) supplemented with 34 mM dithiothreitol. Each sample was diluted 1:8 with the denaturing solution and heated up to 70° C. for 10 minutes together with the protein express ladder. 35 μL of water for injection (WFI) were added to 40 μL of the denatured sample. 120 μL WFI were added to 12 μL of the ladder. Samples, ladder, protein express wash buffer, gel dye and destain solution are transferred to the respective reservoirs. Samples are electrokinetically loaded from a microtiter plate onto the chip integrating the separation, staining, destaining, and detection of the protein and its size variants. The resulting electropherograms were evaluated and changes in purity were reported. An overview on the percentaged purity detected post stress is given by Table 29 and compared to unstressed samples (T0).

[0492] Higher purities were observed for hALB and scFc constructs if compared to the non HLE construct under all conditions. Slight decreases in purity if compared to T0 were detected for hALB and scFc constructs upon heat and light stress. The loss in purity after 4 weeks storage at 37° C. totals 8.4% for the hALB construct and 6.6% for the scFc constructs. The losses upon light exposure were comparable between hALB and scFc.

TABLE 29
Overview on percentaged purity in stressed
and unstressed (T0) EGFRvIII-non
HLE, -hALB, and -scFc preparations
determined via LabChip GXII (Caliper).

| | Non HLE | | |
|---|---|---|---|
| Construct | (canonical) | hALB | scFc |
| T0 | 57.4 | 96.0 | 92.2 |
| 4 w 37° C. | 60.6 | 87.6 | 85.6 |
| Light exposure | 61.5 | 90.1 | 86.4 |

### Example 15

[0493] Different BiTE® antibody constructs designed for targeting DLL3 including DLL3-hALB and DLL3-scFc were formulated, respectively. The target protein concentration was 1.0 mg/mL for both constructs. Formulated BiTE® antibody constructs were filled to 1 mL in type I glass vials which were stoppered with butyl rubber stoppers and crimped with aluminum seals. Filled vials were incubated at 37° C. (DLL3-hALB) and 40° C. (DLL3-scFc) for 4 weeks. Samples stored at −70° C. served as controls (T0). Samples were analyzed by SE-UPLC according to the method described under Example 13. Results are outlined in Table 30. The scFc construct exhibited a reduced monomer loss (2.3%) upon heat stress if compared to the hALB construct (4.0%) although the incubation temperature was slightly higher.

TABLE 30
Overview on monomer
peak percentage in
stressed and unstressed (T0)
DLL3-hALB and -scFc
preparations determined
via SE-UPLC.

| Construct | hALB | scFc |
|---|---|---|
| T0 | 97.6% | 99.8% |
| 4 w | 93.6% | 97.5% |

### Example 16

[0494] Different BiTE® antibody constructs designed for targeting CD19 including CD19-Xbody and CD19-scFc were examined. The target protein concentration was 1.0 mg/mL. Formulated BiTE® antibody constructs were filled to 1 mL in type I glass vials which were stoppered with butyl rubber stoppers and crimped with aluminum seals. Filled vials were incubated at −20° C. and 37° C. for 4 weeks. Additionally, all samples were exposed to 1.2 MLux visible light and 173 W*h/m² UVA light. Chamber temperature was adjusted to 25° C. Samples stored at −70° C. served as controls (T0). Samples stored at −20 and −37° C. were analyzed by SE-UPLC according to the method described under Example 13. Results are outlined in Table 31.

[0495] The scFc construct preserved a higher monomer content when stored for four weeks at −20 and 37° C. respectively if compared to the Xbody.

TABLE 31
Overview on monomer contents
in stressed and unstressed
(T0) CD19-Xbody
and -scFc preparations
determined via SE-UPLC.

| Construct | Xbody | scFc |
|---|---|---|
| T0 | 100.0 | 98.8 |
| 4 w −20° C. | 97.1 | 97.9 |
| 4 w 37° C. | 94.5 | 95.7 |

[0496] Additionally, unstressed samples were assessed for the abundance of subvisible particles by Microfluid Imaging (MFI) using the method described under Example 13. Results are outlined in Table 32. The CD19-scFc preparation exhibited significantly lower amounts of subvisible particles if compared to the CD19-Xbody preparation. This applies to all included size fractions.

TABLE 32
Assessment of subvisible particles by MFI in unstressed
CD19-Xbody and -scFc

| Construct | Xbody | | | | scFc | | | |
|---|---|---|---|---|---|---|---|---|
| Particle size [μm] | ≧2 | ≧5 | ≧10 | ≧25 | ≧2 | ≧5 | ≧10 | ≧25 |
| T0 | 2648 | 688 | 192 | 32 | 160 | 64 | 43 | 11 |

[0497] Samples from light stress were also analyzed by Weak Cation Exchange (WCX) chromatography in order to quantify the percentaged content of charge variants using a UPLC Aquity H class from Waters according to the method described under Example 13. Relative areas under the curve of the main peak as well as of acidic and basic charge variants was reported (Table 33).

[0498] The scFc construct showed enhanced stability against light exposure if compared to the Xbody indicated by a less pronounced loss in main peak which totaled 1.4% compared to 5.5% for the Xbody construct.

TABLE 33
Assessment of charge variants by WCX chromatography in CD19-Xbody
and -scFc preparations after heat and light induced stress.

| | Xbody | | | scFc | | |
|---|---|---|---|---|---|---|
| Construct | % | % | % | % | % | % |
| Fraction | main | acidics | basics | main | acidics | basics |
| T0 | 51.4 | 30.3 | 18.3 | 83.5 | 1.3 | 15.2 |
| Light exposure | 45.9 | 33.2 | 20.9 | 82.1 | 1.2 | 16.7 |

### Example 17: Size Exclusion Chromatography of Bispecific scFc Variants

[0499] The constructs D9F, T2G, D3L, T7I and K6C (see FIG. 7) were each tested for their running behavior by size exclusion chromatography according to standard procedures. In detail, a defined amount of 25 μg of each construct were run (at 750 μl/min) in Citrate Lysin Buffer (10 mM and 75 mM, pH7) on a Superdex 200 increase 10/300GL column at room temperature and the OD 280 nm was recorded. Subsequently, constructs have been compared by their retention times. As a result, construct D9F shows significantly delayed elution (Table 34) as compared to T2G, D3L, T7I and K6C, which indicates a difference in the structure/arrangement of the Fc domains. This difference in retention time was most significant with construct T7I having unpaired cysteines in the hinge region and the linkage of CH2 and CH2CH3 to CH3 (18.98 min vs. 18.62 min, difference of 0.36 min). However, also the difference in retention time of 0.16 min between D9F and T2G is significant taking the respective retention time of the BSA control into consideration. The BSA control showed a retention time of 19.07 min for the monomer and 16.82 min for the dimer displaying a difference of 2.25 min in retention time for a doubled molecular weight. Hence, as the constructs having only structural differences in the Fc part, 0.16 min difference in retention time are significant. In summary, construct D9F showed the longest retention time indicating the strongest binding. This conclusion leads to the expectation of D9F also has the longest half live in vivo.

TABLE 34

| | Retention |
|---|---|
| Construct | time in min |
| D9F | 18.98 |
| T2G | 18.82 |
| D3L | 18.78 |
| K6C | 18.77 |
| T7I | 18.62 |
| BSA monomer | 19.07 |
| BSA dimer | 16.82 |

### Example 18: Surface Plasmon Resonance-Based Determination of Binding to Human FcRn (FCGRT/B2M)

[0500] The constructs D9F, T2G, D3L, T7I and K6C (FIG. 7) were each tested for their capability of binding against human FcRn in SPR (Biacore) experiments according to standard procedures. In detail, CM5 Sensor Chips (GE Healthcare) were immobilized with 450-500 RU of FCGRT/B2M (ACRO Biosystems) by using Na acetate buffer pH 4.5 and a running buffer consisting of 200 mM HEPES, 150 mM NaCl, 3 mM EDTA pH 6.0. The constructs were then injected in subsequent runs in two concentrations of 250 nM and 125 nM diluted in 200 mM HEPES, 150 mM NaCl, 3 mM EDTA, pH 6.0 and 36° C. Association was done for 90 seconds with a 30 μl/min flow rate followed by the dissociation phase for 90 seconds at a 30 μl/min flow rate in 200 mM HEPES, 150 mM NaCl, 3 mM EDTA, pH 6.0 at 36° C. Subsequent regeneration was done for 10 sec with 30 μl/min with 10 mM HEPES, 150 mM NaCl, 3 mM EDTA pH 7.4.

[0501] The maximal binding during the injection phase was measured for all constructs as the respective response units (RU), equivalent to the molecular mass increase on the FcRn coated CM5 chip due to bound construct. All constructs were measured in duplicates. Average values of the duplicate determinations are depicted in FIGS. 8A and 8B, respectively.

[0502] As a result, construct D9F shows significantly higher mass increase on the FcRn coated CM5 chip, as compared to T2G, D3L, T7I and K6C, which indicates stronger binding affinity of D9F to human FcRn. This observation was seen for both concentrations of the respective constructs.

[0503] The binding against FcRn is mediated through the Fc portion within the constructs. Stronger binding against human FcRn as described in the literature is an indicator for longer halflife in vivo due to a higher intracellular rescue of the respective protein and a therefore reduced degradation rate. For this reason, stronger binding of D9F to human FcRn as compared to the other constructs makes this molecule clearly superior as a basis for therapeutic molecules to allow for longer exposure of the potential drug in the patient and a lower frequency of drug administration.

### Example 19: Surface Plasmon Resonance-Based Determination of Binding to Human FcRn (FCGRT/B2M)

[0504] The constructs D9F, T2G, D3L, T7I and K6C and a human IgG1-kappa antibody MT201 were each tested for their capability of binding against human FcRn in SPR (Biacore) experiments according to standard procedures. In detail, CM5 Sensor Chips (GE Healthcare) were immobilized with around 350 RU of FCGRT/B2M (ACRO Biosystems) by using Na acetate buffer pH 4.5 and a running buffer consisting of 200 mM HEPES, 150 mM NaCl, 3 mM EDTA pH 6.0. The constructs and the human IgG1-kappa control (MT201) were then injected at a concentration of 125 nM diluted in 200 mM HEPES, 150 mM NaCl, 3 mM EDTA, pH 6.0 and 36° C. Association was done for 90 seconds with a 30 μl/min flow rate followed by the dissociation phase for 60 seconds at a 30 μl/min flow rate in 200 mM HEPES, 150 mM NaCl, 3 mM EDTA, pH 6.0 at 36° C. Subsequent regeneration was done for 10 sec with 30 μl/min with 10 mM HEPES, 150 mM NaCl, 3 mM EDTA pH 7.4.

[0505] The maximal binding during the injection phase was measured for all constructs as the respective response units (RU), equivalent to the molecular mass increase on the FcRn coated CM5 chip due to bound construct. All constructs were measured in duplicates. Average values of the duplicate determinations are depicted in FIG. 9 including standard deviation error bars.

[0506] As a result, construct D9F shows significantly higher mass increase on the FcRn coated CM5 chip, as compared to T2G, D3L, T7I and K6C, which indicates stronger binding affinity of D9F to human FcRn. The mass increase on the FcRn-coated CM5 chip for D9F is well comparable to the mass increase of the human IgG1-kappa control antibody MT201, indicating a comparable binding of construct D9F to human FcRn.

[0507] The binding against FcRn is mediated through the human IgG1 Fc portion within the constructs. Stronger binding against human FcRn as described in the field is an indicator for longer half-life in vivo due to a higher intracellular rescue of the respective protein and a therefore reduced degradation rate. For this reason, stronger binding of D9F to human FcRn in the range of a human IgG1-kappa antibody (MT201), as compared to the other constructs makes this molecule clearly superior as a basis for therapeutic molecules to allow for longer exposure of the potential drug in the patient, presumably in the range of a full human IgG1 antibody, and a lower frequency of drug administration.

TABLE 35
Sequence table

| SEQ ID | | Format/ | |
|---|---|---|---|
| NO: | Designation | Source | Sequence |
| 1. | G4S linker | | GGGGS |
| 2. | (G4S)2 linker | | GGGGSGGGGS |
| 3. | (G4S)3 linker | | GGGGSGGGGSGGGGS |
| 4. | (G4S)4 linker | | GGGGSGGGGSGGGGSGGGGS |
| 5. | (G4S)5 linker | | GGGGSGGGGSGGGGSGGGGSGGGGS |
| 6. | (G4S)6 linker | | GGGGSGGGGSGGGGSGGGGSGGGGSGGGGS |
| 7. | (G4S)7 linker | | GGGGSGGGGSGGGGSGGGGSGGGGSGGGGSGGGGS |
| 8. | (G4S)8 linker | | GGGGSGGGGSGGGGSGGGGSGGGGSGGGGSGGGGSGGGGS |
| 9. | Peptide | | PGGGGS |
| | linker | | |
| 10. | Peptide | | PGGDGS |
| | linker | | |
| 11. | Peptide | | SGGGGS |
| | linker | | |
| 12. | Peptide | | GGGG |
| | linker | | |
| 13. | CD3ε binder | | QTVVTQEPSLTVSPGGTVTLTCGSSTGAVTSGNYPNWVQQKPGQAPR |
| | VL | | GLIGGTKFLAPGTPARFSGSLLGGKAALTLSGVQPEDEAEYYCVLWY |
| | | | SNRWVFGGGTKLTVL |
| 14. | CD3ε binder | | EVQLVESGGGLVQPGGSLRLSCAASGFTFNSYAMNWVRQAPGKGLEW |
| | VH | | VARIRSKYNNYATYYADSVKGRFTISRDDSKNTAYLQMNSLKTEDTA |
| | | | VYYCVRHGNFGNSYVSWWAYWGQGTLVTVSS |
| 15. | CD3ε binder | | EVQLVESGGGLVQPGGSLRLSCAASGFTFNSYAMNWVRQAPGKGLEW |
| | scFv | | VARIRSKYNNYATYYADSVKGRFTISRDDSKNTAYLQMNSLKTEDTA |
| | | | VYYCVRHGNFGNSYVSWWAYWGQGTLVTVSSGGGGSGGGGSGGGGSQ |
| | | | TVVTQEPSLTVSPGGTVTLTCGSSTGAVTSGNYPNWVQQKPGQAPRG |
| | | | LIGGTKFLAPGTPARFSGSLLGGKAALTLSGVQPEDEAEYYCVLWYS |
| | | | NRWVFGGGTKLTVL |
| 16. | hexa- | | HHHHHH |
| | histidine tag | | |
| 17. | Fc monomer- | | DKTHTCPPCPAPELLGGPSVFLFPPKPKDTLMISRTPEVTCVVVDVS |
| | 1 | | HEDPEVKFNWYVDGVEVHNAKTKPCEEQYGSTYRCVSVLTVLHQDWL |
| | +c/-g | | NGKEYKCKVSNKALPAPIEKTISKAKGQPREPQVYTLPPSREEMTKN |
| | | | QVSLTCLVKGFYPSDIAVEWESNGQPENNYKTTPPVLDSDGSFFLYS |
| | | | KLTVDKSRWQQGNVFSCSVMHEALHNHYTQKSLSLSPGK |
| 18. | Fc monomer- | | DKTHTCPPCPAPELLGGPSVFLFPPKPKDTLMISRTPEVTCVVVDVS |
| | 2 | | HEDPEVKFNWYVDGVEVHNAKTKPCEEQYGSTYRCVSVLTVLHQDWL |
| | +c/-g/delGK | | NGKEYKCKVSNKALPAPIEKTISKAKGQPREPQVYTLPPSREEMTKN |
| | | | QVSLTCLVKGFYPSDIAVEWESNGQPENNYKTTPPVLDSDGSFFLYS |
| | | | KLTVDKSRWQQGNVFSCSVMHEALHNHYTQKSLSLSP |
| 19. | Fc monomer- | | DKTHTCPPCPAPELLGGPSVFLFPPKPKDTLMISRTPEVTCVVVDVS |
| | 3 | | HEDPEVKFNWYVDGVEVHNAKTKPREEQYNSTYRVVSVLTVLHQDWL |
| | -c/+g | | NGKEYKCKVSNKALPAPIEKTISKAKGQPREPQVYTLPPSREEMTKN |
| | | | QVSLTCLVKGFYPSDIAVEWESNGQPENNYKTTPPVLDSDGSFFLYS |
| | | | KLTVDKSRWQQGNVFSCSVMHEALHNHYTQKSLSLSPGK |
| 20. | Fc monomer- | | DKTHTCPPCPAPELLGGPSVFLFPPKPKDTLMISRTPEVTCVVVDVS |
| | 4 | | HEDPEVKFNWYVDGVEVHNAKTKPREEQYNSTYRVVSVLTVLHQDWL |
| | -c/+g/delGK | | NGKEYKCKVSNKALPAPIEKTISKAKGQPREPQVYTLPPSREEMTKN |
| | | | QVSLTCLVKGFYPSDIAVEWESNGQPENNYKTTPPVLDSDGSFFLYS |
| | | | KLTVDKSRWQQGNVFSCSVMHEALHNHYTQKSLSLSP |
| 21. | Fc monomer- | | DKTHTCPPCPAPELLGGPSVFLFPPKPKDTLMISRTPEVTCVVVDVS |
| | 5 | | HEDPEVKFNWYVDGVEVHNAKTKPREEQYGSTYRVVSVLTVLHQDWL |
| | -c/-g | | NGKEYKCKVSNKALPAPIEKTISKAKGQPREPQVYTLPPSREEMTKN |
| | | | QVSLTCLVKGFYPSDIAVEWESNGQPENNYKTTPPVLDSDGSFFLYS |
| | | | KLTVDKSRWQQGNVFSCSVMHEALHNHYTQKSLSLSPGK |
| 22. | Fc monomer- | | DKTHTCPPCPAPELLGGPSVFLFPPKPKDTLMISRTPEVTCVVVDVS |
| | 6 | | HEDPEVKFNWYVDGVEVHNAKTKPREEQYGSTYRVVSVLTVLHQDWL |
| | -c/-g/delGK | | NGKEYKCKVSNKALPAPIEKTISKAKGQPREPQVYTLPPSREEMTKN |
| | | | QVSLTCLVKGFYPSDIAVEWESNGQPENNYKTTPPVLDSDGSFFLYS |
| | | | KLTVDKSRWQQGNVFSCSVMHEALHNHYTQKSLSLSP |
| 23. | Fc monomer- | | DKTHTCPPCPAPELLGGPSVFLFPPKPKDTLMISRTPEVTCVVVDVS |
| | 7 | | HEDPEVKFNWYVDGVEVHNAKTKPCEEQYNSTYRCVSVLTVLHQDWL |
| | +c/+g | | NGKEYKCKVSNKALPAPIEKTISKAKGQPREPQVYTLPPSREEMTKN |
| | | | QVSLTCLVKGFYPSDIAVEWESNGQPENNYKTTPPVLDSDGSFFLYS |
| | | | KLTVDKSRWQQGNVFSCSVMHEALHNHYTQKSLSLSPGK |
| 24. | Fc monomer- | | DKTHTCPPCPAPELLGGPSVFLFPPKPKDTLMISRTPEVTCVVVDVS |
| | 8 | | HEDPEVKFNWYVDGVEVHNAKTKPCEEQYNSTYRCVSVLTVLHQDWL |
| | +c/+g/delGK | | NGKEYKCKVSNKALPAPIEKTISKAKGQPREPQVYTLPPSREEMTKN |
| | | | QVSLTCLVKGFYPSDIAVEWESNGQPENNYKTTPPVLDSDGSFFLYS |
| | | | KLTVDKSRWQQGNVFSCSVMHEALHNHYTQKSLSLSP |
| 25. | scFc-1 | | DKTHTCPPCPAPELLGGPSVFLFPPKPKDTLMISRTPEVTCVVVDVS |
| | | | HEDPEVKFNWYVDGVEVHNAKTKPCEEQYGSTYRCVSVLTVLHQDWL |
| | | | NGKEYKCKVSNKALPAPIEKTISKAKGQPREPQVYTLPPSREEMTKN |
| | | | QVSLTCLVKGFYPSDIAVEWESNGQPENNYKTTPPVLDSDGSFFLYS |
| | | | KLTVDKSRWQQGNVFSCSVMHEALHNHYTQKSLSLSPGKGGGGSGGG |
| | | | GSGGGGSGGGGSGGGGSGGGGSDKTHTCPPCPAPELLGGPSVFLFPP |
| | | | KPKDTLMISRTPEVTCVVVDVSHEDPEVKFNWYVDGVEVHNAKTKPC |
| | | | EEQYGSTYRCVSVLTVLHQDWLNGKEYKCKVSNKALPAPIEKTISKA |
| | | | KGQPREPQVYTLPPSREEMTKNQVSLTCLVKGFYPSDIAVEWESNGQ |
| | | | PENNYKTTPPVLDSDGSFFLYSKLTVDKSRWQQGNVFSCSVMHEALH |
| | | | NHYTQKSLSLSPGK |
| 26. | scFc-2 | | DKTHTCPPCPAPELLGGPSVFLFPPKPKDTLMISRTPEVTCVVVDVS |
| | | | HEDPEVKFNWYVDGVEVHNAKTKPCEEQYGSTYRCVSVLTVLHQDWL |
| | | | NGKEYKCKVSNKALPAPIEKTISKAKGQPREPQVYTLPPSREEMTKN |
| | | | QVSLTCLVKGFYPSDIAVEWESNGQPENNYKTTPPVLDSDGSFFLYS |
| | | | KLTVDKSRWQQGNVFSCSVMHEALHNHYTQKSLSLSPGGGGSGGGGS |
| | | | GGGGSGGGGSGGGGSGGGGSDKTHTCPPCPAPELLGGPSVFLFPPKP |
| | | | KDTLMISRTPEVTCVVVDVSHEDPEVKFNWYVDGVEVHNAKTKPCEE |
| | | | QYGSTYRCVSVLTVLHQDWLNGKEYKCKVSNKALPAPIEKTISKAKG |
| | | | QPREPQVYTLPPSREEMTKNQVSLTCLVKGFYPSDIAVEWESNGQPE |
| | | | NNYKTTPPVLDSDGSFFLYSKLTVDKSRWQQGNVFSCSVMHEALHNH |
| | | | YTQKSLSLSP |
| 27. | scFc-3 | | DKTHTCPPCPAPELLGGPSVFLFPPKPKDTLMISRTPEVTCVVVDVS |
| | | | HEDPEVKFNWYVDGVEVHNAKTKPREEQYNSTYRVVSVLTVLHQDWL |
| | | | NGKEYKCKVSNKALPAPIEKTISKAKGQPREPQVYTLPPSREEMTKN |
| | | | QVSLTCLVKGFYPSDIAVEWESNGQPENNYKTTPPVLDSDGSFFLYS |
| | | | KLTVDKSRWQQGNVFSCSVMHEALHNHYTQKSLSLSPGKGGGGSGGG |
| | | | GSGGGGSGGGGSGGGGSGGGGSDKTHTCPPCPAPELLGGPSVFLFPP |
| | | | KPKDTLMISRTPEVTCVVVDVSHEDPEVKFNWYVDGVEVHNAKTKPR |
| | | | EEQYNSTYRVVSVLTVLHQDWLNGKEYKCKVSNKALPAPIEKTISKA |
| | | | KGQPREPQVYTLPPSREEMTKNQVSLTCLVKGFYPSDIAVEWESNGQ |
| | | | PENNYKTTPPVLDSDGSFFLYSKLTVDKSRWQQGNVFSCSVMHEALH |
| | | | NHYTQKSLSLSPGK |
| 28. | scFc-4 | | DKTHTCPPCPAPELLGGPSVFLFPPKPKDTLMISRTPEVTCVVVDVS |
| | | | HEDPEVKFNWYVDGVEVHNAKTKPREEQYNSTYRVVSVLTVLHQDWL |
| | | | NGKEYKCKVSNKALPAPIEKTISKAKGQPREPQVYTLPPSREEMTKN |
| | | | QVSLTCLVKGFYPSDIAVEWESNGQPENNYKTTPPVLDSDGSFFLYS |
| | | | KLTVDKSRWQQGNVFSCSVMHEALHNHYTQKSLSLSPGGGGSGGGGS |
| | | | GGGGSGGGGSGGGGSGGGGSDKTHTCPPCPAPELLGGPSVFLFPPKP |
| | | | KDTLMISRTPEVTCVVVDVSHEDPEVKFNWYVDGVEVHNAKTKPREE |
| | | | QYNSTYRVVSVLTVLHQDWLNGKEYKCKVSNKALPAPIEKTISKAKG |
| | | | QPREPQVYTLPPSREEMTKNQVSLTCLVKGFYPSDIAVEWESNGQPE |
| | | | NNYKTTPPVLDSDGSFFLYSKLTVDKSRWQQGNVFSCSVMHEALHNH |
| | | | YTQKSLSLSP |
| 29. | scFc-5 | | DKTHTCPPCPAPELLGGPSVFLFPPKPKDTLMISRTPEVTCVVVDVS |
| | | | HEDPEVKFNWYVDGVEVHNAKTKPREEQYGSTYRVVSVLTVLHQDWL |
| | | | NGKEYKCKVSNKALPAPIEKTISKAKGQPREPQVYTLPPSREEMTKN |
| | | | QVSLTCLVKGFYPSDIAVEWESNGQPENNYKTTPPVLDSDGSFFLYS |
| | | | KLTVDKSRWQQGNVFSCSVMHEALHNHYTQKSLSLSPGKGGGGSGGG |
| | | | GSGGGGSGGGGSGGGGSGGGGSDKTHTCPPCPAPELLGGPSVFLFPP |
| | | | KPKDTLMISRTPEVTCVVVDVSHEDPEVKFNWYVDGVEVHNAKTKPR |
| | | | EEQYGSTYRVVSVLTVLHQDWLNGKEYKCKVSNKALPAPIEKTISKA |
| | | | KGQPREPQVYTLPPSREEMTKNQVSLTCLVKGFYPSDIAVEWESNGQ |
| | | | PENNYKTTPPVLDSDGSFFLYSKLTVDKSRWQQGNVFSCSVMHEALH |
| | | | NHYTQKSLSLSPGK |
| 30. | scFc-6 | | DKTHTCPPCPAPELLGGPSVFLFPPKPKDTLMISRTPEVTCVVVDVS |
| | | | HEDPEVKFNWYVDGVEVHNAKTKPREEQYGSTYRVVSVLTVLHQDWL |
| | | | NGKEYKCKVSNKALPAPIEKTISKAKGQPREPQVYTLPPSREEMTKN |
| | | | QVSLTCLVKGFYPSDIAVEWESNGQPENNYKTTPPVLDSDGSFFLYS |
| | | | KLTVDKSRWQQGNVFSCSVMHEALHNHYTQKSLSLSPGGGGSGGGGS |
| | | | GGGGSGGGGSGGGGSGGGGSDKTHTCPPCPAPELLGGPSVFLFPPKP |
| | | | KDTLMISRTPEVTCVVVDVSHEDPEVKFNWYVDGVEVHNAKTKPREE |
| | | | QYGSTYRVVSVLTVLHQDWLNGKEYKCKVSNKALPAPIEKTISKAKG |
| | | | QPREPQVYTLPPSREEMTKNQVSLTCLVKGFYPSDIAVEWESNGQPE |
| | | | NNYKTTPPVLDSDGSFFLYSKLTVDKSRWQQGNVFSCSVMHEALHNH |
| | | | YTQKSLSLSP |
| 31. | scFc-7 | | DKTHTCPPCPAPELLGGPSVFLFPPKPKDTLMISRTPEVTCVVVDVS |
| | | | HEDPEVKFNWYVDGVEVHNAKTKPCEEQYNSTYRCVSVLTVLHQDWL |
| | | | NGKEYKCKVSNKALPAPIEKTISKAKGQPREPQVYTLPPSREEMTKN |
| | | | QVSLTCLVKGFYPSDIAVEWESNGQPENNYKTTPPVLDSDGSFFLYS |
| | | | KLTVDKSRWQQGNVFSCSVMHEALHNHYTQKSLSLSPGKGGGGSGGG |
| | | | GSGGGGSGGGGSGGGGSGGGGSDKTHTCPPCPAPELLGGPSVFLFPP |
| | | | KPKDTLMISRTPEVTCVVVDVSHEDPEVKFNWYVDGVEVHNAKTKPC |
| | | | EEQYNSTYRCVSVLTVLHQDWLNGKEYKCKVSNKALPAPIEKTISKA |
| | | | KGQPREPQVYTLPPSREEMTKNQVSLTCLVKGFYPSDIAVEWESNGQ |
| | | | PENNYKTTPPVLDSDGSFFLYSKLTVDKSRWQQGNVFSCSVMHEALH |
| | | | NHYTQKSLSLSPGK |
| 32. | scFc-8 | | DKTHTCPPCPAPELLGGPSVFLFPPKPKDTLMISRTPEVTCVVVDVS |
| | | | HEDPEVKFNWYVDGVEVHNAKTKPCEEQYNSTYRCVSVLTVLHQDWL |
| | | | NGKEYKCKVSNKALPAPIEKTISKAKGQPREPQVYTLPPSREEMTKN |
| | | | QVSLTCLVKGFYPSDIAVEWESNGQPENNYKTTPPVLDSDGSFFLYS |
| | | | KLTVDKSRWQQGNVFSCSVMHEALHNHYTQKSLSLSPGGGGSGGGGS |
| | | | GGGGSGGGGSGGGGSGGGGSDKTHTCPPCPAPELLGGPSVFLFPPKP |
| | | | KDTLMISRTPEVTCVVVDVSHEDPEVKFNWYVDGVEVHNAKTKPCEE |
| | | | QYNSTYRCVSVLTVLHQDWLNGKEYKCKVSNKALPAPIEKTISKAKG |
| | | | QPREPQVYTLPPSREEMTKNQVSLTCLVKGFYPSDIAVEWESNGQPE |
| | | | NNYKTTPPVLDSDGSFFLYSKLTVDKSRWQQGNVFSCSVMHEALHNH |
| | | | YTQKSLSLSP |
| 33. | MSLN-HLE | Hetero Fc | QVQLVESGGGLVKPGGSLRLSCAASGFTFSDYYMTWIRQAPGKGLEW |
| | | chain 1 | LSYISSSGSTIYYADSVKGRFTISRDNAKNSLFLQMNSLRAEDTAVY |
| | | | YCARDRNSHFDYWGQGTLVTVSSGGGGSGGGGSGGGGSDIQMTQSPS |
| | | | SVSASVGDRVTITCRASQGINTWLAWYQQKPGKAPKLLIYGASGLQS |
| | | | GVPSRFSGSGSGTDFTLTISSLQPEDFATYYCQQAKSFPRTFGQGTK |
| | | | VEIKSGGGGSEVQLVESGGGLVQPGGSLKLSCAASGFTFNKYAMNWV |
| | | | RQAPGKGLEWVARIRSKYNNYATYYADSVKDRFTISRDDSKNTAYLQ |
| | | | MNNLKTEDTAVYYCVRHGNFGNSYISYWAYWGQGTLVTVSSGGGGSG |
| | | | GGGSGGGGSQTVVTQEPSLTVSPGGTVTLTCGSSTGAVTSGNYPNWV |
| | | | QQKPGQAPRGLIGGTKFLAPGTPARFSGSLLGGKAALTLSGVQPEDE |
| | | | AEYYCVLWYSNRWVFGGGTKLTVLGGGGDKTHTCPPCPAPELLGGPS |
| | | | VFLFPPKPKDTLMISRTPEVTCVVVDVSHEDPEVKFNWYVDGVEVHN |
| | | | AKTKPCEEQYGSTYRCVSVLTVLHQDWLNGKEYKCKVSNKALPAPIE |
| | | | KTISKAKGQPREPQVYTLPPSRKEMTKNQVSLTCLVKGFYPSDIAVE |
| | | | WESNGQPENNYKTTPPVLKSDGSFFLYSKLTVDKSRWQQGNVFSCSV |
| | | | MHEALHNHYTQKSLSLSPGK |
| 34. | MSLN-HLE | Hetero Fc | DKTHTCPPCPAPELLGGPSVFLFPPKPKDTLMISRTPEVTCVVVDVS |
| | | chain 2 | HEDPEVKFNWYVDGVEVHNAKTKPCEEQYGSTYRCVSVLTVLHQDWL |
| | | | NGKEYKCKVSNKALPAPIEKTISKAKGQPREPQVYTLPPSREEMTKN |
| | | | QVSLTCLVKGFYPSDIAVEWESNGQPENNYDTTPPVLDSDGSFFLYS |
| | | | DLTVDKSRWQQGNVFSCSVMHEALHNHYTQKSLSLSPGK |
| 35. | MSLN-HLE | hALB | QVQLVESGGGLVKPGGSLRLSCAASGFTFSDYYMTWIRQAPGKGLEW |
| | | fusion | LSYISSSGSTIYYADSVKGRFTISRDNAKNSLFLQMNSLRAEDTAVY |
| | | | YCARDRNSHFDYWGQGTLVTVSSGGGGSGGGGSGGGGSDIQMTQSPS |
| | | | SVSASVGDRVTITCRASQGINTWLAWYQQKPGKAPKLLIYGASGLQS |
| | | | GVPSRFSGSGSGTDFTLTISSLQPEDFATYYCQQAKSFPRTFGQGTK |
| | | | VEIKSGGGGSEVQLVESGGGLVQPGGSLKLSCAASGFTFNKYAMNWV |
| | | | RQAPGKGLEWVARIRSKYNNYATYYADSVKDRFTISRDDSKNTAYLQ |
| | | | MNNLKTEDTAVYYCVRHGNFGNSYISYWAYWGQGTLVTVSSGGGGSG |
| | | | GGGSGGGGSQTVVTQEPSLTVSPGGTVTLTCGSSTGAVTSGNYPNWV |
| | | | QQKPGQAPRGLIGGTKFLAPGTPARFSGSLLGGKAALTLSGVQPEDE |
| | | | AEYYCVLWYSNRWVFGGGTKLTVLPGGDGSDAHKSEVAHRFKDLGEE |
| | | | NFKALVLIAFAQYLQQCPFEDHVKLVNEVTEFAKTCVADESAENCDK |
| | | | SLHTLFGDKLCTVATLRETYGEMADCCAKQEPERNECFLQHKDDNPN |
| | | | LPRLVRPEVDVMCTAFHDNEETFLKKYLYEIARRHPYFYAPELLFFA |
| | | | KRYKAAFTECCQAADKAACLLPKLDELRDEGKASSAKQRLKCASLQK |
| | | | FGERAFKAWAVARLSQRFPKAEFAEVSKLVTDLTKVHTECCHGDLLE |
| | | | CADDRADLAKYICENQDSISSKLKECCEKPLLEKSHCIAEVENDEMP |
| | | | ADLPSLAADFVESKDVCKNYAEAKDVFLGMFLYEYARRHPDYSVVLL |
| | | | LRLAKTYETTLEKCCAAADPHECYAKVFDEFKPLVEEPQNLIKQNCE |
| | | | LFEQLGEYKFQNALLVRYTKKVPQVSTPTLVEVSRNLGKVGSKCCKH |
| | | | PEAKRMPCAEDYLSVVLNQLCVLHEKTPVSDRVTKCCTESLVNRRPC |
| | | | FSALEVDETYVPKEFNAETFTFHADICTLSEKERQIKKQTALVELVK |
| | | | HKPKATKEQLKAVMDDFAAFVEKCCKADDKETCFAEEGKKLVAASQA |
| | | | ALGLHHHHHH |
| 36. | CDH19-HLEa | X-body | EVQLVESGGGLVQPGGSLKLSCAASGFTFNKYAMNWVRQAPGKGLEW |
| | | chain 1 | VARIRSKYNNYATYYADSVKDRFTISRDDSKNTAYLQMNNLKTEDTA |
| | | | VYYCVRHGNFGNSYISYWAYWGQGTLVTVSSGGGGSGGGGSSYELTQ |
| | | | PPSVSVSPGQTASITCSGDRLGEKYTSWYQQRPGQSPLLVIYQDTKR |
| | | | PSGIPERFSGSNSGNTATLTISGTQAMDEADYYCQAWESSTVVFGGG |
| | | | TKLTVLASTKGPSVFPLAPSSKSTSGGTAALGCLVKDYFPEPVTVSW |
| | | | NSGALTSGVHTFPAVLQSSGLYSLSSVVTVPSSSLGTQTYICNVNHK |
| | | | PSNTKVDKKVEPKSCDKTHTCPPCPAPELLGGPSVFLFPPKPKDTLM |
| | | | ISRTPEVTCVVVDVSHEDPEVKFNWYVDGVEVHNAKTKPCEEQYGST |
| | | | YRCVSVLTVLHQDWLNGKEYKCKVSNKALPAPIEKTISKAKGQPREP |
| | | | QVYTLPPSREEMTKNQVSLTCLVKGFYPSDIAVEWESNGQPENNYDT |
| | | | TPPVLDSDGSFFLYSDLTVDKSRWQQGNVFSCSVMHEALHNHYTQKS |
| | | | LSLSPGK |
| 37. | CDH19-HLEb | X-body | QVQLVESGGGVVQPGGSLRLSCAASGFTFSSYGMHWVRQAPGKGLEW |
| | | chain 2 | VAFIWYEGSNKYYAESVKDRFTISRDNSKNTLYLQMNSLRAEDTAVY |
| | | | YCARRAGIIGTIGYYYGMDVWGQGTTVTVSSGGGGSGGGGSQTVVTQ |
| | | | EPSLTVSPGGTVTLTCGSSTGAVTSGNYPNWVQQKPGQAPRGLIGGT |
| | | | KFLAPGTPARFSGSLLGGKAALTLSGVQPEDEAEYYCVLWYSNRWVF |
| | | | GGGTKLTVLGQPKAAPSVTLFPPSSEELQANKATLVCLISDFYPGAV |
| | | | TVAWKADSSPVKAGVETTTPSKQSNNKYAASSYLSLTPEQWKSHRSY |
| | | | SCQVTHEGSTVEKTVAPTECSDKTHTCPPCPAPELLGGPSVFLFPPK |
| | | | PKDTLMISRTPEVTCVVVDVSHEDPEVKFNWYVDGVEVHNAKTKPCE |
| | | | EQYGSTYRCVSVLTVLHQDWLNGKEYKCKVSNKALPAPIEKTISKAK |
| | | | GQPREPQVYTLPPSRKEMTKNQVSLTCLVKGFYPSDIAVEWESNGQP |
| | | | ENNYKTTPPVLKSDGSFFLYSKLTVDKSRWQQGNVFSCSVMHEALHN |
| | | | HYTQKSLSLSPGK |
| 38. | CDH19-HLE | Hetero Fc | QVQLVESGGGVVQPGGSLRLSCAASGFTFSSYGMHWVRQAPGKGLEW |
| | | chain 1 | VAFIWYEGSNKYYAESVKDRFTISRDNSKNTLYLQMNSLRAEDTAVY |
| | | | YCARRAGIIGTIGYYYGMDVWGQGTTVTVSSGGGGSGGGGSGGGGSS |
| | | | YELTQPPSVSVSPGQTASITCSGDRLGEKYTSWYQQRPGQSPLLVIY |
| | | | QDTKRPSGIPERFSGSNSGNTATLTISGTQAMDEADYYCQAWESSTV |
| | | | VFGGGTKLTVLSGGGGSEVQLVESGGGLVQPGGSLKLSCAASGFTFN |
| | | | KYAMNWVRQAPGKGLEWVARIRSKYNNYATYYADSVKDRFTISRDDS |
| | | | KNTAYLQMNNLKTEDTAVYYCVRHGNFGNSYISYWAYWGQGTLVTVS |
| | | | SGGGGSGGGGSGGGGSQTVVTQEPSLTVSPGGTVTLTCGSSTGAVTS |
| | | | GNYPNWVQQKPGQAPRGLIGGTKFLAPGTPARFSGSLLGGKAALTLS |
| | | | GVQPEDEAEYYCVLWYSNRWVFGGGTKLTVLGGGGDKTHTCPPCPAP |
| | | | ELLGGPSVFLFPPKPKDTLMISRTPEVTCVVVDVSHEDPEVKFNWYV |
| | | | DGVEVHNAKTKPCEEQYGSTYRCVSVLTVLHQDWLNGKEYKCKVSNK |
| | | | ALPAPIEKTISKAKGQPREPQVYTLPPSRKEMTKNQVSLTCLVKGFY |
| | | | PSDIAVEWESNGQPENNYKTTPPVLKSDGSFFLYSKLTVDKSRWQQG |
| | | | NVFSCSVMHEALHNHYTQKSLSLSPGK |
| 39. | CDH19-HLE | Hetero Fc | DKTHTCPPCPAPELLGGPSVFLFPPKPKDTLMISRTPEVTCVVVDVS |
| | | chain 2 | HEDPEVKFNWYVDGVEVHNAKTKPCEEQYGSTYRCVSVLTVLHQDWL |
| | | | NGKEYKCKVSNKALPAPIEKTISKAKGQPREPQVYTLPPSREEMTKN |
| | | | QVSLTCLVKGFYPSDIAVEWESNGQPENNYDTTPPVLDSDGSFFLYS |
| | | | DLTVDKSRWQQGNVFSCSVMHEALHNHYTQKSLSLSPGK |
| 40. | CD33-HLE | Hetero Fc | QVQINQSGAEVKKPGESVKVSCKASGYTFTNYGMNWVKQAPGQCLEW |
| | | chain 1 | MGWINTYTGEPTYADKFQGRVTMTTDTSTSTAYMEIRNLGGDDTAVY |
| | | | YCARWSWSDGYYVYFDYWGQGTSVTVSSGGGGSGGGGSGGGGSDIVM |
| | | | TQSPDSLTVSLGERTTINCKSSQSVLDSSTNKNSLAWYQQKPGQPPK |
| | | | LLLSWASTRESGIPDRFSGSGSGTDFTLTIDSPQPEDSATYYCQQSA |
| | | | HFPITFGCGTRLEIKSGGGGSEVQLVESGGGLVQPGGSLKLSCAASG |
| | | | FTFNKYAMNWVRQAPGKGLEWVARIRSKYNNYATYYADSVKDRFTIS |
| | | | RDDSKNTAYLQMNNLKTEDTAVYYCVRHGNFGNSYISYWAYWGQGTL |
| | | | VTVSSGGGGSGGGGSGGGGSQTVVTQEPSLTVSPGGTVTLTCGSSTG |
| | | | AVTSGNYPNWVQQKPGQAPRGLIGGTKFLAPGTPARFSGSLLGGKAA |
| | | | LTLSGVQPEDEAEYYCVLWYSNRWVFGGGTKLTVLGGGGDKTHTCPP |
| | | | CPAPELLGGPSVFLFPPKPKDTLMISRTPEVTCVVVDVSHEDPEVKF |
| | | | NWYVDGVEVHNAKTKPCEEQYGSTYRCVSVLTVLHQDWLNGKEYKCK |
| | | | VSNKALPAPIEKTISKAKGQPREPQVYTLPPSRKEMTKNQVSLTCLV |
| | | | KGFYPSDIAVEWESNGQPENNYKTTPPVLKSDGSFFLYSKLTVDKSR |
| | | | WQQGNVFSCSVMHEALHNHYTQKSLSLSPGK |
| 41. | CD33-HLE | Hetero Fc | DKTHTCPPCPAPELLGGPSVFLFPPKPKDTLMISRTPEVTCVVVDVS |
| | | chain 2 | HEDPEVKFNWYVDGVEVHNAKTKPCEEQYGSTYRCVSVLTVLHQDWL |
| | | | NGKEYKCKVSNKALPAPIEKTISKAKGQPREPQVYTLPPSREEMTKN |
| | | | QVSLTCLVKGFYPSDIAVEWESNGQPENNYDTTPPVLDSDGSFFLYS |
| | | | DLTVDKSRWQQGNVFSCSVMHEALHNHYTQKSLSLSPGK |
| 42. | CD33-HLE | scFc | QVQLVQSGAEVKKPGESVKVSCKASGYTFTNYGMNWVKQAPGQCLEW |
| | | | MGWINTYTGEPTYADKFQGRVTMTTDTSTSTAYMEIRNLGGDDTAVY |
| | | | YCARWSWSDGYYVYFDYWGQGTSVTVSSGGGGSGGGGSGGGGSDIVM |
| | | | TQSPDSLTVSLGERTTINCKSSQSVLDSSTNKNSLAWYQQKPGQPPK |
| | | | LLLSWASTRESGIPDRFSGSGSGTDFTLTIDSPQPEDSATYYCQQSA |
| | | | HFPITFGCGTRLEIKSGGGGSEVQLVESGGGLVQPGGSLKLSCAASG |
| | | | FTFNKYAMNWVRQAPGKGLEWVARIRSKYNNYATYYADSVKDRFTIS |
| | | | RDDSKNTAYLQMNNLKTEDTAVYYCVRHGNFGNSYISYWAYWGQGTL |
| | | | VTVSSGGGGSGGGGSGGGGSQTVVTQEPSLTVSPGGTVTLTCGSSTG |
| | | | AVTSGNYPNWVQQKPGQAPRGLIGGTKFLAPGTPARFSGSLLGGKAA |
| | | | LTLSGVQPEDEAEYYCVLWYSNRWVFGGGTKLTVLGGGGDKTHTCPP |
| | | | CPAPELLGGPSVFLFPPKPKDTLMISRTPEVTCVVVDVSHEDPEVKF |
| | | | NWYVDGVEVHNAKTKPCEEQYGSTYRCVSVLTVLHQDWLNGKEYKCK |
| | | | VSNKALPAPIEKTISKAKGQPREPQVYTLPPSREEMTKNQVSLTCLV |
| | | | KGFYPSDIAVEWESNGQPENNYKTTPPVLDSDGSFFLYSKLTVDKSR |
| | | | WQQGNVFSCSVMHEALHNHYTQKSLSLSPGKGGGGSGGGGSGGGGSG |
| | | | GGGSGGGGSGGGGSDKTHTCPPCPAPELLGGPSVFLFPPKPKDTLMI |
| | | | SRTPEVTCVVVDVSHEDPEVKFNWYVDGVEVHNAKTKPCEEQYGSTY |
| | | | RCVSVLTVLHQDWLNGKEYKCKVSNKALPAPIEKTISKAKGQPREPQ |
| | | | VYTLPPSREEMTKNQVSLTCLVKGFYPSDIAVEWESNGQPENNYKTT |
| | | | PPVLDSDGSFFLYSKLTVDKSRWQQGNVFSCSVMHEALHNHYTQKSL |
| | | | SLSPGK |
| 43. | CD20-HLE | scFc | QVQLVQSGAEVKKPGSSVKVSCKASGYAFSYSWINWVRQAPGQGLEW |
| | | | MGRIFPGDGDTDYNGKFKGRVTITADKSTSTAYMELSSLRSEDTAVY |
| | | | YCARNVFDGYWLVYWGQGTLVTVSSGGGGSGGGGSGGGGSDIVMTQT |
| | | | PLSLPVTPGEPASISCRSSKSLLHSNGITYLYWYLQKPGQSPQLLIY |
| | | | QMSNLVSGVPDRFSGSGSGTDFTLKISRVEAEDVGVYYCAQNLELPY |
| | | | TFGGGTKVEIKSGGGGSEVQLVESGGGLVQPGGSLKLSCAASGFTFN |
| | | | KYAMNWVRQAPGKGLEWVARIRSKYNNYATYYADSVKDRFTISRDDS |
| | | | KNTAYLQMNNLKTEDTAVYYCVRHGNFGNSYISYWAYWGQGTLVTVS |
| | | | SGGGGSGGGGSGGGGSQTVVTQEPSLTVSPGGTVTLTCGSSTGAVTS |
| | | | GNYPNWVQQKPGQAPRGLIGGTKFLAPGTPARFSGSLLGGKAALTLS |
| | | | GVQPEDEAEYYCVLWYSNRWVFGGGTKLTVLGGGGDKTHTCPPCPAP |
| | | | ELLGGPSVFLFPPKPKDTLMISRTPEVTCVVVDVSHEDPEVKFNWYV |
| | | | DGVEVHNAKTKPCEEQYGSTYRCVSVLTVLHQDWLNGKEYKCKVSNK |
| | | | ALPAPIEKTISKAKGQPREPQVYTLPPSREEMTKNQVSLTCLVKGFY |
| | | | PSDIAVEWESNGQPENNYKTTPPVLDSDGSFFLYSKLTVDKSRWQQG |
| | | | NVFSCSVMHEALHNHYTQKSLSLSPGKGGGGSGGGGSGGGGSGGGGS |
| | | | GGGGSGGGGSDKTHTCPPCPAPELLGGPSVFLFPPKPKDTLMISRTP |
| | | | EVTCVVVDVSHEDPEVKFNWYVDGVEVHNAKTKPCEEQYGSTYRCVS |
| | | | VLTVLHQDWLNGKEYKCKVSNKALPAPIEKTISKAKGQPREPQVYTL |
| | | | PPSREEMTKNQVSLTCLVKGFYPSDIAVEWESNGQPENNYKTTPPVL |
| | | | DSDGSFFLYSKLTVDKSRWQQGNVFSCSVMHEALHNHYTQKSLSLSP |
| | | | GK |
| 44. | CD33xI2C- | VH CDR1 | NYGMN |
| | scFc | | |
| 45. | CD33xI2C- | VH CDR2 | WINTYTGEPTYADKFQG |
| | scFc | | |
| 46. | CD33xI2C- | VH CDR3 | WSWSDGYYVYFDY |
| | scFc | | |
| 47. | CD33xI2C- | VL CDR1 | KSSQSVLDSSTNKNSLA |
| | scFc | | |
| 48. | CD33xI2C- | VL CDR2 | WASTRES |
| | scFc | | |
| 49. | CD33xI2C- | VL CDR3 | QQSAHFPIT |
| | scFc | | |
| 50. | CD33xI2C- | VH | QVQLVQSGAEVKKPGESVKVSCKASGYTFTNYGMNWVKQAPGQGLEW |
| | scFc | | MGWINTYTGEPTYADKFQGRVTMTTDTSTSTAYMEIRNLGGDDTAVY |
| | | | YCARWSWSDGYYVYFDYWGQGTSVTVSS |
| 51. | CD33xI2C- | VL | DIVMTQSPDSLTVSLGERTTINCKSSQSVLDSSTNKNSLAWYQQKPG |
| | scFc | | QPPKLLLSWASTRESGIPDRFSGSGSGTDFTLTIDSPQPEDSATYYC |
| | | | QQSAHFPITFGQGTRLEIK |
| 52. | CD33xI2C- | scFv | QVQLVQSGAEVKKPGESVKVSCKASGYTFTNYGMNWVKQAPGQGLEW |
| | scFc | | MGWINTYTGEPTYADKFQGRVTMTTDTSTSTAYMEIRNLGGDDTAVY |
| | | | YCARWSWSDGYYVYFDYWGQGTSVTVSSGGGGSGGGGSGGGGSDIVM |
| | | | TQSPDSLTVSLGERTTINCKSSQSVLDSSTNKNSLAWYQQKPGQPPK |
| | | | LLLSWASTRESGIPDRFSGSGSGTDFTLTIDSPQPEDSATYYCQQSA |
| | | | HFPITFGQGTRLEIK |
| 53. | CD33xI2C- | Bispecific | QVQLVQSGAEVKKPGESVKVSCKASGYTFTNYGMNWVKQAPGQGLEW |
| | scFc | molecule | MGWINTYTGEPTYADKFQGRVTMTTDTSTSTAYMEIRNLGGDDTAVY |
| | | | YCARWSWSDGYYVYFDYWGQGTSVTVSSGGGGSGGGGSGGGGSDIVM |
| | | | TQSPDSLTVSLGERTTINCKSSQSVLDSSTNKNSLAWYQQKPGQPPK |
| | | | LLLSWASTRESGIPDRFSGSGSGTDFTLTIDSPQPEDSATYYCQQSA |
| | | | HFPITFGQGTRLEIKSGGGGSEVQLVESGGGLVQPGGSLKLSCAASG |
| | | | FTFNKYAMNWVRQAPGKGLEWVARIRSKYNNYATYYADSVKDRFTIS |
| | | | RDDSKNTAYLQMNNLKTEDTAVYYCVRHGNFGNSYISYWAYWGQGTL |
| | | | VTVSSGGGGSGGGGSGGGGSQTVVTQEPSLTVSPGGTVTLTCGSSTG |
| | | | AVTSGNYPNWVQQKPGQAPRGLIGGTKFLAPGTPARFSGSLLGGKAA |
| | | | LTLSGVQPEDEAEYYCVLWYSNRWVFGGGTKLTVL |
| 54. | CD33xI2C- | Bispecific | QVQLVQSGAEVKKPGESVKVSCKASGYTFTNYGMNWVKQAPGQGLEW |
| | scFc | HLE | MGWINTYTGEPTYADKFQGRVTMTTDTSTSTAYMEIRNLGGDDTAVY |
| | | molecule | YCARWSWSDGYYVYFDYWGQGTSVTVSSGGGGSGGGGSGGGGSDIVM |
| | | | TQSPDSLTVSLGERTTINCKSSQSVLDSSTNKNSLAWYQQKPGQPPK |
| | | | LLLSWASTRESGIPDRFSGSGSGTDFTLTIDSPQPEDSATYYCQQSA |
| | | | HFPITFGQGTRLEIKSGGGGSEVQLVESGGGLVQPGGSLKLSCAASG |
| | | | FTFNKYAMNWVRQAPGKGLEWVARIRSKYNNYATYYADSVKDRFTIS |
| | | | RDDSKNTAYLQMNNLKTEDTAVYYCVRHGNFGNSYISYWAYWGQGTL |
| | | | VTVSSGGGGSGGGGSGGGGSQTVVTQEPSLTVSPGGTVTLTCGSSTG |
| | | | AVTSGNYPNWVQQKPGQAPRGLIGGTKFLAPGTPARFSGSLLGGKAA |
| | | | LTLSGVQPEDEAEYYCVLWYSNRWVFGGGTKLTVLGGGGDKTHTCPP |
| | | | CPAPELLGGPSVFLFPPKPKDTLMISRTPEVTCVVVDVSHEDPEVKF |
| | | | NWYVDGVEVHNAKTKPCEEQYGSTYRCVSVLTVLHQDWLNGKEYKCK |
| | | | VSNKALPAPIEKTISKAKGQPREPQVYTLPPSREEMTKNQVSLTCLV |
| | | | KGFYPSDIAVEWESNGQPENNYKTTPPVLDSDGSFFLYSKLTVDKSR |
| | | | WQQGNVFSCSVMHEALHNHYTQKSLSLSPGKGGGGSGGGGSGGGGSG |
| | | | GGGSGGGGSGGGGSDKTHTCPPCPAPELLGGPSVFLFPPKPKDTLMI |
| | | | SRTPEVTCVVVDVSHEDPEVKFNWYVDGVEVHNAKTKPCEEQYGSTY |
| | | | RCVSVLTVLHQDWLNGKEYKCKVSNKALPAPIEKTISKAKGQPREPQ |
| | | | VYTLPPSREEMTKNQVSLTCLVKGFYPSDIAVEWESNGQPENNYKTT |
| | | | PPVLDSDGSFFLYSKLTVDKSRWQQGNVFSCSVMHEALHNHYTQKSL |
| | | | SLSPGK |
| 55. | CD33xI2C- | Bispecific | QVQLVQSGAEVKKPGESVKVSCKASGYTFTNYGMNWVKQAPGQGLEW |
| | scFc_delGK | HLE | MGWINTYTGEPTYADKFQGRVTMTTDTSTSTAYMEIRNLGGDDTAVY |
| | | molecule | YCARWSWSDGYYVYFDYWGQGTSVTVSSGGGGSGGGGSGGGGSDIVM |
| | | | TQSPDSLTVSLGERTTINCKSSQSVLDSSTNKNSLAWYQQKPGQPPK |
| | | | LLLSWASTRESGIPDRFSGSGSGTDFTLTIDSPQPEDSATYYCQQSA |
| | | | HFPITFGQGTRLEIKSGGGGSEVQLVESGGGLVQPGGSLKLSCAASG |
| | | | FTFNKYAMNWVRQAPGKGLEWVARIRSKYNNYATYYADSVKDRFTIS |
| | | | RDDSKNTAYLQMNNLKTEDTAVYYCVRHGNFGNSYISYWAYWGQGTL |
| | | | VTVSSGGGGSGGGGSGGGGSQTVVTQEPSLTVSPGGTVTLTCGSSTG |
| | | | AVTSGNYPNWVQQKPGQAPRGLIGGTKFLAPGTPARFSGSLLGGKAA |
| | | | LTLSGVQPEDEAEYYCVLWYSNRWVFGGGTKLTVLGGGGDKTHTCPP |
| | | | CPAPELLGGPSVFLFPPKPKDTLMISRTPEVTCVVVDVSHEDPEVKF |
| | | | NWYVDGVEVHNAKTKPCEEQYGSTYRCVSVLTVLHQDWLNGKEYKCK |
| | | | VSNKALPAPIEKTISKAKGQPREPQVYTLPPSREEMTKNQVSLTCLV |
| | | | KGFYPSDIAVEWESNGQPENNYKTTPPVLDSDGSFFLYSKLTVDKSR |
| | | | WQQGNVFSCSVMHEALHNHYTQKSLSLSPGGGGSGGGGSGGGGSGGG |
| | | | GSGGGGSGGGGSDKTHTCPPCPAPELLGGPSVFLFPPKPKDTLMISR |
| | | | TPEVTCVVVDVSHEDPEVKFNWYVDGVEVHNAKTKPCEEQYGSTYRC |
| | | | VSVLTVLHQDWLNGKEYKCKVSNKALPAPIEKTISKAKGQPREPQVY |
| | | | TLPPSREEMTKNQVSLTCLVKGFYPSDIAVEWESNGQPENNYKTTPP |
| | | | VLDSDGSFFLYSKLTVDKSRWQQGNVFSCSVMHEALHNHYTQKSLSL |
| | | | SPGK |
| 56. | CD33_CCxI2C- | VH | QVQLVQSGAEVKKPGESVKVSCKASGYTFTNYGMNWVKQAPGQCLEW |
| | scFc | | MGWINTYTGEPTYADKFQGRVTMTTDTSTSTAYMEIRNLGGDDTAVY |
| | | | YCARWSWSDGYYVYFDYWGQGTSVTVSS |
| 57. | CD33_CCxI2C- | VL | DIVMTQSPDSLTVSLGERTTINCKSSQSVLDSSTNKNSLAWYQQKPG |
| | scFc | | QPPKLLLSWASTRESGIPDRFSGSGSGTDFTLTIDSPQPEDSATYYC |
| | | | QQSAHFPITFGCGTRLEIK |
| 58. | CD33_CCxI2C- | scFv | QVQLVQSGAEVKKPGESVKVSCKASGYTFTNYGMNWVKQAPGQCLEW |
| | scFc | | MGWINTYTGEPTYADKFQGRVTMTTDTSTSTAYMEIRNLGGDDTAVY |
| | | | YCARWSWSDGYYVYFDYWGQGTSVTVSSGGGGSGGGGSGGGGSDIVM |
| | | | TQSPDSLTVSLGERTTINCKSSQSVLDSSTNKNSLAWYQQKPGQPPK |
| | | | LLLSWASTRESGIPDRFSGSGSGTDFTLTIDSPQPEDSATYYCQQSA |
| | | | HFPITFGCGTRLEIK |
| 59. | CD33_CCxI2C | Bispecific | QVQLVQSGAEVKKPGESVKVSCKASGYTFTNYGMNWVKQAPGQCLEW |
| | | molecule | MGWINTYTGEPTYADKFQGRVTMTTDTSTSTAYMEIRNLGGDDTAVY |
| | | | YCARWSWSDGYYVYFDYWGQGTSVTVSSGGGGSGGGGSGGGGSDIVM |
| | | | TQSPDSLTVSLGERTTINCKSSQSVLDSSTNKNSLAWYQQKPGQPPK |
| | | | LLLSWASTRESGIPDRFSGSGSGTDFTLTIDSPQPEDSATYYCQQSA |
| | | | HFPITFGCGTRLEIKSGGGGSEVQLVESGGGLVQPGGSLKLSCAASG |
| | | | FTFNKYAMNWVRQAPGKGLEWVARIRSKYNNYATYYADSVKDRFTIS |
| | | | RDDSKNTAYLQMNNLKTEDTAVYYCVRHGNFGNSYISYWAYWGQGTL |
| | | | VTVSSGGGGSGGGGSGGGGSQTVVTQEPSLTVSPGGTVTLTCGSSTG |
| | | | AVTSGNYPNWVQQKPGQAPRGLIGGTKFLAPGTPARFSGSLLGGKAA |
| | | | LTLSGVQPEDEAEYYCVLWYSNRWVFGGGTKLTVL |
| 60. | CD33_CCxI2C- | Bispecific | QVQLVQSGAEVKKPGESVKVSCKASGYTFTNYGMNWVKQAPGQCLEW |
| | scFc | HLE | MGWINTYTGEPTYADKFQGRVTMTTDTSTSTAYMEIRNLGGDDTAVY |
| | | molecule | YCARWSWSDGYYVYFDYWGQGTSVTVSSGGGGSGGGGSGGGGSDIVM |
| | | | TQSPDSLTVSLGERTTINCKSSQSVLDSSTNKNSLAWYQQKPGQPPK |
| | | | LLLSWASTRESGIPDRFSGSGSGTDFTLTIDSPQPEDSATYYCQQSA |
| | | | HFPITFGCGTRLEIKSGGGGSEVQLVESGGGLVQPGGSLKLSCAASG |
| | | | FTFNKYAMNWVRQAPGKGLEWVARIRSKYNNYATYYADSVKDRFTIS |
| | | | RDDSKNTAYLQMNNLKTEDTAVYYCVRHGNFGNSYISYWAYWGQGTL |
| | | | VTVSSGGGGSGGGGSGGGGSQTVVTQEPSLTVSPGGTVTLTCGSSTG |
| | | | AVTSGNYPNWVQQKPGQAPRGLIGGTKFLAPGTPARFSGSLLGGKAA |
| | | | LTLSGVQPEDEAEYYCVLWYSNRWVFGGGTKLTVLGGGGDKTHTCPP |
| | | | CPAPELLGGPSVFLFPPKPKDTLMISRTPEVTCVVVDVSHEDPEVKF |
| | | | NWYVDGVEVHNAKTKPCEEQYGSTYRCVSVLTVLHQDWLNGKEYKCK |
| | | | VSNKALPAPIEKTISKAKGQPREPQVYTLPPSREEMTKNQVSLTCLV |
| | | | KGFYPSDIAVEWESNGQPENNYKTTPPVLDSDGSFFLYSKLTVDKSR |
| | | | WQQGNVFSCSVMHEALHNHYTQKSLSLSPGKGGGGSGGGGSGGGGSG |
| | | | GGGSGGGGSGGGGSDKTHTCPPCPAPELLGGPSVFLFPPKPKDTLMI |
| | | | SRTPEVTCVVVDVSHEDPEVKFNWYVDGVEVHNAKTKPCEEQYGSTY |
| | | | RCVSVLTVLHQDWLNGKEYKCKVSNKALPAPIEKTISKAKGQPREPQ |
| | | | VYTLPPSREEMTKNQVSLTCLVKGFYPSDIAVEWESNGQPENNYKTT |
| | | | PPVLDSDGSFFLYSKLTVDKSRWQQGNVFSCSVMHEALHNHYTQKSL |
| | | | SLSPGK |
| 61. | CD33_CCxI2C- | Bispecific | QVQLVQSGAEVKKPGESVKVSCKASGYTFTNYGMNWVKQAPGQCLEW |
| | scFc_delGK | HLE | MGWINTYTGEPTYADKFQGRVTMTTDTSTSTAYMEIRNLGGDDTAVY |
| | | molecule | YCARWSWSDGYYVYFDYWGQGTSVTVSSGGGGSGGGGSGGGGSDIVM |
| | | | TQSPDSLTVSLGERTTINCKSSQSVLDSSTNKNSLAWYQQKPGQPPK |
| | | | LLLSWASTRESGIPDRFSGSGSGTDFTLTIDSPQPEDSATYYCQQSA |
| | | | HFPITFGCGTRLEIKSGGGGSEVQLVESGGGLVQPGGSLKLSCAASG |
| | | | FTFNKYAMNWVRQAPGKGLEWVARIRSKYNNYATYYADSVKDRFTIS |
| | | | RDDSKNTAYLQMNNLKTEDTAVYYCVRHGNFGNSYISYWAYWGQGTL |
| | | | VTVSSGGGGSGGGGSGGGGSQTVVTQEPSLTVSPGGTVTLTCGSSTG |
| | | | AVTSGNYPNWVQQKPGQAPRGLIGGTKFLAPGTPARFSGSLLGGKAA |
| | | | LTLSGVQPEDEAEYYCVLWYSNRWVFGGGTKLTVLGGGGDKTHTCPP |
| | | | CPAPELLGGPSVFLFPPKPKDTLMISRTPEVTCVVVDVSHEDPEVKF |
| | | | NWYVDGVEVHNAKTKPCEEQYGSTYRCVSVLTVLHQDWLNGKEYKCK |
| | | | VSNKALPAPIEKTISKAKGQPREPQVYTLPPSREEMTKNQVSLTCLV |
| | | | KGFYPSDIAVEWESNGQPENNYKTTPPVLDSDGSFFLYSKLTVDKSR |
| | | | WQQGNVFSCSVMHEALHNHYTQKSLSLSPGGGGSGGGGSGGGGSGGG |
| | | | GSGGGGSGGGGSDKTHTCPPCPAPELLGGPSVFLFPPKPKDTLMISR |
| | | | TPEVTCVVVDVSHEDPEVKFNWYVDGVEVHNAKTKPCEEQYGSTYRC |
| | | | VSVLTVLHQDWLNGKEYKCKVSNKALPAPIEKTISKAKGQPREPQVY |
| | | | TLPPSREEMTKNQVSLTCLVKGFYPSDIAVEWESNGQPENNYKTTPP |
| | | | VLDSDGSFFLYSKLTVDKSRWQQGNVFSCSVMHEALHNHYTQKSLSL |
| | | | SPGK |
| 62. | EGFRvIIIxCD3- | VH CDR1 | NYGMH |
| | scFc | | |
| 63. | EGFRvIIIxCD3- | VH CDR2 | VIWYDGSDKYYADSVRG |
| | scFc | | |
| 64. | EGFRvIIIxCD3- | VH CDR3 | DGYDILTGNPRDFDY |
| | scFc | | |
| 65. | EGFRvIIIxCD3- | VL CDR1 | RSSQSLVHSDGNTYLS |
| | scFc | | |
| 66. | EGFRvIIIxCD3- | VL CDR2 | RISRRFS |
| | scFc | | |
| 67. | EGFRvIIIxCD3- | VL CDR3 | MQSTHVPRT |
| | scFc | | |
| 68. | EGFRvIIIxCD3- | VH | QVQLVESGGGVVQSGRSLRLSCAASGFTFRNYGMHWVRQAPGKGLEW |
| | scFc | | VAVIWYDGSDKYYADSVRGRFTISRDNSKNTLYLQMNSLRAEDTAVY |
| | | | YCARDGYDILTGNPRDFDYWGQGTLVTVSS |
| 69. | EGFRvIIIxCD3- | VL | DTVMTQTPLSSHVTLGQPASISCRSSQSLVHSDGNTYLSWLQQRPGQ |
| | scFc | | PPRLLIYRISRRFSGVPDRFSGSGAGTDFTLEISRVEAEDVGVYYCM |
| | | | QSTHVPRTFGQGTKVEIK |
| 70. | EGFRvIIIxCD3- | scFv | QVQLVESGGGVVQSGRSLRLSCAASGFTFRNYGMHWVRQAPGKGLEW |
| | scFc | | VAVIWYDGSDKYYADSVRGRFTISRDNSKNTLYLQMNSLRAEDTAVY |
| | | | YCARDGYDILTGNPRDFDYWGQGTLVTVSSGGGGSGGGGSGGGGSDT |
| | | | VMTQTPLSSHVTLGQPASISCRSSQSLVHSDGNTYLSWLQQRPGQPP |
| | | | RLLIYRISRRFSGVPDRFSGSGAGTDFTLEISRVEAEDVGVYYCMQS |
| | | | THVPRTFGQGTKVEIK |
| 71. | EGFRvIIIxCD3- | Bispecific | QVQLVESGGGVVQSGRSLRLSCAASGFTFRNYGMHWVRQAPGKGLEW |
| | scFc | molecule | VAVIWYDGSDKYYADSVRGRFTISRDNSKNTLYLQMNSLRAEDTAVY |
| | | | YCARDGYDILTGNPRDFDYWGQGTLVTVSSGGGGSGGGGSGGGGSDT |
| | | | VMTQTPLSSHVTLGQPASISCRSSQSLVHSDGNTYLSWLQQRPGQPP |
| | | | RLLIYRISRRFSGVPDRFSGSGAGTDFTLEISRVEAEDVGVYYCMQS |
| | | | THVPRTFGQGTKVEIKSGGGGSEVQLVESGGGLVQPGGSLKLSCAAS |
| | | | GFTFNKYAMNWVRQAPGKGLEWVARIRSKYNNYATYYADSVKDRFTI |
| | | | SRDDSKNTAYLQMNNLKTEDTAVYYCVRHGNFGNSYISYWAYWGQGT |
| | | | LVTVSSGGGGSGGGGSGGGGSQTVVTQEPSLTVSPGGTVTLTCGSST |
| | | | GAVTSGNYPNWVQQKPGQAPRGLIGGTKFLAPGTPARFSGSLLGGKA |
| | | | ALTLSGVQPEDEAEYYCVLWYSNRWVFGGGTKLTVL |
| 72. | EGFRvIIIxCD3- | Bispecific | QVQLVESGGGVVQSGRSLRLSCAASGFTFRNYGMHWVRQAPGKGLEW |
| | scFc | HLE | VAVIWYDGSDKYYADSVRGRFTISRDNSKNTLYLQMNSLRAEDTAVY |
| | | molecule | YCARDGYDILTGNPRDFDYWGQGTLVTVSSGGGGSGGGGSGGGGSDT |
| | | | VMTQTPLSSHVTLGQPASISCRSSQSLVHSDGNTYLSWLQQRPGQPP |
| | | | RLLIYRISRRFSGVPDRFSGSGAGTDFTLEISRVEAEDVGVYYCMQS |
| | | | THVPRTFGQGTKVEIKSGGGGSEVQLVESGGGLVQPGGSLKLSCAAS |
| | | | GFTFNKYAMNWVRQAPGKGLEWVARIRSKYNNYATYYADSVKDRFTI |
| | | | SRDDSKNTAYLQMNNLKTEDTAVYYCVRHGNFGNSYISYWAYWGQGT |
| | | | LVTVSSGGGGSGGGGSGGGGSQTVVTQEPSLTVSPGGTVTLTCGSST |
| | | | GAVTSGNYPNWVQQKPGQAPRGLIGGTKFLAPGTPARFSGSLLGGKA |
| | | | ALTLSGVQPEDEAEYYCVLWYSNRWVFGGGTKLTVLGGGGDKTHTCP |
| | | | PCPAPELLGGPSVFLFPPKPKDTLMISRTPEVTCVVVDVSHEDPEVK |
| | | | FNWYVDGVEVHNAKTKPCEEQYGSTYRCVSVLTVLHQDWLNGKEYKC |
| | | | KVSNKALPAPIEKTISKAKGQPREPQVYTLPPSREEMTKNQVSLTCL |
| | | | VKGFYPSDIAVEWESNGQPENNYKTTPPVLDSDGSFFLYSKLTVDKS |
| | | | RWQQGNVFSCSVMHEALHNHYTQKSLSLSPGKGGGGSGGGGSGGGGS |
| | | | GGGGSGGGGSGGGGSDKTHTCPPCPAPELLGGPSVFLFPPKPKDTLM |
| | | | ISRTPEVTCVVVDVSHEDPEVKFNWYVDGVEVHNAKTKPCEEQYGST |
| | | | YRCVSVLTVLHQDWLNGKEYKCKVSNKALPAPIEKTISKAKGQPREP |
| | | | QVYTLPPSREEMTKNQVSLTCLVKGFYPSDIAVEWESNGQPENNYKT |
| | | | TPPVLDSDGSFFLYSKLTVDKSRWQQGNVFSCSVMHEALHNHYTQKS |
| | | | LSLSPGK |
| 73. | EGFRvIIIxCD3- | Bispecific | QVQLVESGGGVVQSGRSLRLSCAASGFTFRNYGMHWVRQAPGKGLEW |
| | scFcdelGK | HLE | VAVIWYDGSDKYYADSVRGRFTISRDNSKNTLYLQMNSLRAEDTAVY |
| | | molecule | YCARDGYDILTGNPRDFDYWGQGTLVTVSSGGGGSGGGGSGGGGSDT |
| | | | VMTQTPLSSHVTLGQPASISCRSSQSLVHSDGNTYLSWLQQRPGQPP |
| | | | RLLIYRISRRFSGVPDRFSGSGAGTDFTLEISRVEAEDVGVYYCMQS |
| | | | THVPRTFGQGTKVEIKSGGGGSEVQLVESGGGLVQPGGSLKLSCAAS |
| | | | GFTFNKYAMNWVRQAPGKGLEWVARIRSKYNNYATYYADSVKDRFTI |
| | | | SRDDSKNTAYLQMNNLKTEDTAVYYCVRHGNFGNSYISYWAYWGQGT |
| | | | LVTVSSGGGGSGGGGSGGGGSQTVVTQEPSLTVSPGGTVTLTCGSST |
| | | | GAVTSGNYPNWVQQKPGQAPRGLIGGTKFLAPGTPARFSGSLLGGKA |
| | | | ALTLSGVQPEDEAEYYCVLWYSNRWVFGGGTKLTVLGGGGDKTHTCP |
| | | | PCPAPELLGGPSVFLFPPKPKDTLMISRTPEVTCVVVDVSHEDPEVK |
| | | | FNWYVDGVEVHNAKTKPCEEQYGSTYRCVSVLTVLHQDWLNGKEYKC |
| | | | KVSNKALPAPIEKTISKAKGQPREPQVYTLPPSREEMTKNQVSLTCL |
| | | | VKGFYPSDIAVEWESNGQPENNYKTTPPVLDSDGSFFLYSKLTVDKS |
| | | | RWQQGNVFSCSVMHEALHNHYTQKSLSLSPGGGGSGGGGSGGGGSGG |
| | | | GGSGGGGSGGGGSDKTHTCPPCPAPELLGGPSVFLFPPKPKDTLMIS |
| | | | RTPEVTCVVVDVSHEDPEVKFNWYVDGVEVHNAKTKPCEEQYGSTYR |
| | | | CVSVLTVLHQDWLNGKEYKCKVSNKALPAPIEKTISKAKGQPREPQV |
| | | | YTLPPSREEMTKNQVSLTCLVKGFYPSDIAVEWESNGQPENNYKTTP |
| | | | PVLDSDGSFFLYSKLTVDKSRWQQGNVFSCSVMHEALHNHYTQKSLS |
| | | | LSPGK |
| 74. | EGFRvIII_ | VH | QVQLVESGGGVVQSGRSLRLSCAASGFTFRNYGMHWVRQAPGKCLEW |
| | CCxCD3-scFc | | VAVIWYDGSDKYYADSVRGRFTISRDNSKNTLYLQMNSLRAEDTAVY |
| | | | YCARDGYDILTGNPRDFDYWGQGTLVTVSS |
| 75. | EGFRvIII_ | VL | DTVMTQTPLSSHVTLGQPASISCRSSQSLVHSDGNTYLSWLQQRPGQ |
| | CCxCD3-scFc | | PPRLLIYRISRRFSGVPDRFSGSGAGTDFTLEISRVEAEDVGVYYCM |
| | | | QSTHVPRTFGCGTKVEIK |
| 76. | EGFRvIII_ | scFv | QVQLVESGGGVVQSGRSLRLSCAASGFTFRNYGMHWVRQAPGKCLEW |
| | CCxCD3-scFc | | VAVIWYDGSDKYYADSVRGRFTISRDNSKNTLYLQMNSLRAEDTAVY |
| | | | YCARDGYDILTGNPRDFDYWGQGTLVTVSSGGGGSGGGGSGGGGSDT |
| | | | VMTQTPLSSHVTLGQPASISCRSSQSLVHSDGNTYLSWLQQRPGQPP |
| | | | RLLIYRISRRFSGVPDRFSGSGAGTDFTLEISRVEAEDVGVYYCMQS |
| | | | THVPRTFGCGTKVEIK |
| 77. | EGFRvIII_ | Bispecific | QVQLVESGGGVVQSGRSLRLSCAASGFTFRNYGMHWVRQAPGKCLEW |
| | CCxCD3-scFc | HLE | VAVIWYDGSDKYYADSVRGRFTISRDNSKNTLYLQMNSLRAEDTAVY |
| | | molecule | YCARDGYDILTGNPRDFDYWGQGTLVTVSSGGGGSGGGGSGGGGSDT |
| | | | VMTQTPLSSHVTLGQPASISCRSSQSLVHSDGNTYLSWLQQRPGQPP |
| | | | RLLIYRISRRFSGVPDRFSGSGAGTDFTLEISRVEAEDVGVYYCMQS |
| | | | THVPRTFGCGTKVEIKSGGGGSEVQLVESGGGLVQPGGSLKLSCAAS |
| | | | GFTFNKYAMNWVRQAPGKGLEWVARIRSKYNNYATYYADSVKDRFTI |
| | | | SRDDSKNTAYLQMNNLKTEDTAVYYCVRHGNFGNSYISYWAYWGQGT |
| | | | LVTVSSGGGGSGGGGSGGGGSQTVVTQEPSLTVSPGGTVTLTCGSST |
| | | | GAVTSGNYPNWVQQKPGQAPRGLIGGTKFLAPGTPARFSGSLLGGKA |
| | | | ALTLSGVQPEDEAEYYCVLWYSNRWVFGGGTKLTVL |
| 78. | EGFRvIII_ | Bispecific | QVQLVESGGGVVQSGRSLRLSCAASGFTFRNYGMHWVRQAPGKCLEW |
| | CCxCD3-scFc | HLE | VAVIWYDGSDKYYADSVRGRFTISRDNSKNTLYLQMNSLRAEDTAVY |
| | | molecule | YCARDGYDILTGNPRDFDYWGQGTLVTVSSGGGGSGGGGSGGGGSDT |
| | | | VMTQTPLSSHVTLGQPASISCRSSQSLVHSDGNTYLSWLQQRPGQPP |
| | | | RLLIYRISRRFSGVPDRFSGSGAGTDFTLEISRVEAEDVGVYYCMQS |
| | | | THVPRTFGCGTKVEIKSGGGGSEVQLVESGGGLVQPGGSLKLSCAAS |
| | | | GFTFNKYAMNWVRQAPGKGLEWVARIRSKYNNYATYYADSVKDRFTI |
| | | | SRDDSKNTAYLQMNNLKTEDTAVYYCVRHGNFGNSYISYWAYWGQGT |
| | | | LVTVSSGGGGSGGGGSGGGGSQTVVTQEPSLTVSPGGTVTLTCGSST |
| | | | GAVTSGNYPNWVQQKPGQAPRGLIGGTKFLAPGTPARFSGSLLGGKA |
| | | | ALTLSGVQPEDEAEYYCVLWYSNRWVFGGGTKLTVLGGGGDKTHTCP |
| | | | PCPAPELLGGPSVFLFPPKPKDTLMISRTPEVTCVVVDVSHEDPEVK |
| | | | FNWYVDGVEVHNAKTKPCEEQYGSTYRCVSVLTVLHQDWLNGKEYKC |
| | | | KVSNKALPAPIEKTISKAKGQPREPQVYTLPPSREEMTKNQVSLTCL |
| | | | VKGFYPSDIAVEWESNGQPENNYKTTPPVLDSDGSFFLYSKLTVDKS |
| | | | RWQQGNVFSCSVMHEALHNHYTQKSLSLSPGKGGGGSGGGGSGGGGS |
| | | | GGGGSGGGGSGGGGSDKTHTCPPCPAPELLGGPSVFLFPPKPKDTLM |
| | | | ISRTPEVTCVVVDVSHEDPEVKFNWYVDGVEVHNAKTKPCEEQYGST |
| | | | YRCVSVLTVLHQDWLNGKEYKCKVSNKALPAPIEKTISKAKGQPREP |
| | | | QVYTLPPSREEMTKNQVSLTCLVKGFYPSDIAVEWESNGQPENNYKT |
| | | | TPPVLDSDGSFFLYSKLTVDKSRWQQGNVFSCSVMHEALHNHYTQKS |
| | | | LSLSPGK |
| 79. | EGFRvIII_ | bispecific | QVQLVESGGGVVQSGRSLRLSCAASGFTFRNYGMHWVRQAPGKCLEW |
| | CCxCD3- | molecule | VAVIWYDGSDKYYADSVRGRFTISRDNSKNTLYLQMNSLRAEDTAVY |
| | scFc_delGK | | YCARDGYDILTGNPRDFDYWGQGTLVTVSSGGGGSGGGGSGGGGSDT |
| | | | VMTQTPLSSHVTLGQPASISCRSSQSLVHSDGNTYLSWLQQRPGQPP |
| | | | RLLIYRISRRFSGVPDRFSGSGAGTDFTLEISRVEAEDVGVYYCMQS |
| | | | THVPRTFGCGTKVEIKSGGGGSEVQLVESGGGLVQPGGSLKLSCAAS |
| | | | GFTFNKYAMNWVRQAPGKGLEWVARIRSKYNNYATYYADSVKDRFTI |
| | | | SRDDSKNTAYLQMNNLKTEDTAVYYCVRHGNFGNSYISYWAYWGQGT |
| | | | LVTVSSGGGGSGGGGSGGGGSQTVVTQEPSLTVSPGGTVTLTCGSST |
| | | | GAVTSGNYPNWVQQKPGQAPRGLIGGTKFLAPGTPARFSGSLLGGKA |
| | | | ALTLSGVQPEDEAEYYCVLWYSNRWVFGGGTKLTVLGGGGDKTHTCP |
| | | | PCPAPELLGGPSVFLFPPKPKDTLMISRTPEVTCVVVDVSHEDPEVK |
| | | | FNWYVDGVEVHNAKTKPCEEQYGSTYRCVSVLTVLHQDWLNGKEYKC |
| | | | KVSNKALPAPIEKTISKAKGQPREPQVYTLPPSREEMTKNQVSLTCL |
| | | | VKGFYPSDIAVEWESNGQPENNYKTTPPVLDSDGSFFLYSKLTVDKS |
| | | | RWQQGNVFSCSVMHEALHNHYTQKSLSLSPGGGGSGGGGSGGGGSGG |
| | | | GGSGGGGSGGGGSDKTHTCPPCPAPELLGGPSVFLFPPKPKDTLMIS |
| | | | RTPEVTCVVVDVSHEDPEVKFNWYVDGVEVHNAKTKPCEEQYGSTYR |
| | | | CVSVLTVLHQDWLNGKEYKCKVSNKALPAPIEKTISKAKGQPREPQV |
| | | | YTLPPSREEMTKNQVSLTCLVKGFYPSDIAVEWESNGQPENNYKTTP |
| | | | PVLDSDGSFFLYSKLTVDKSRWQQGNVFSCSVMHEALHNHYTQKSLS |
| | | | LSPGK |
| 80. | MS_1xCD3- | VH CDR1 | DYYMT |
| | scFc | | |
| 81. | MS_1xCD3- | VH CDR2 | YISSSGSTIYYADSVKG |
| | scFc | | |
| 82. | MS_1xCD3- | VH CDR3 | DRNSHFDY |
| | scFc | | |
| 83. | MS_1xCD3- | VL CDR1 | RASQGINTWLA |
| | scFc | | |
| 84. | MS_1xCD3- | VL CDR2 | GASGLQS |
| | scFc | | |
| 85. | MS_1xCD3- | VL CDR3 | QQAKSFPRT |
| | scFc | | |
| 86. | MS_1xCD3- | VH | QVQLVESGGGLVKPGGSLRLSCAASGFTFSDYYMTWIRQAPGKGLEW |
| | scFc | | LSYISSSGSTIYYADSVKGRFTISRDNAKNSLFLQMNSLRAEDTAVY |
| | | | YCARDRNSHFDYWGQGTLVTVSS |
| 87. | MS_1xCD3- | VL | DIQMTQSPSSVSASVGDRVTITCRASQGINTWLAWYQQKPGKAPKLL |
| | scFc | | IYGASGLQSGVPSRFSGSGSGTDFTLTISSLQPEDFATYYCQQAKSF |
| | | | PRTFGQGTKVEIK |
| 88. | MS_1xCD3- | scFv | QVQLVESGGGLVKPGGSLRLSCAASGFTFSDYYMTWIRQAPGKGLEW |
| | scFc | | LSYISSSGSTIYYADSVKGRFTISRDNAKNSLFLQMNSLRAEDTAVY |
| | | | YCARDRNSHFDYWGQGTLVTVSSGGGGSGGGGSGGGGSDIQMTQSPS |
| | | | SVSASVGDRVTITCRASQGINTWLAWYQQKPGKAPKLLIYGASGLQS |
| | | | GVPSRFSGSGSGTDFTLTISSLQPEDFATYYCQQAKSFPRTFGQGTK |
| | | | VEIK |
| 89. | MS_1xCD3- | Bispecific | QVQLVESGGGLVKPGGSLRLSCAASGFTFSDYYMTWIRQAPGKGLEW |
| | scFc | molecule | LSYISSSGSTIYYADSVKGRFTISRDNAKNSLFLQMNSLRAEDTAVY |
| | | | YCARDRNSHFDYWGQGTLVTVSSGGGGSGGGGSGGGGSDIQMTQSPS |
| | | | SVSASVGDRVTITCRASQGINTWLAWYQQKPGKAPKLLIYGASGLQS |
| | | | GVPSRFSGSGSGTDFTLTISSLQPEDFATYYCQQAKSFPRTFGQGTK |
| | | | VEIKSGGGGSEVQLVESGGGLVQPGGSLKLSCAASGFTFNKYAMNWV |
| | | | RQAPGKGLEWVARIRSKYNNYATYYADSVKDRFTISRDDSKNTAYLQ |
| | | | MNNLKTEDTAVYYCVRHGNFGNSYISYWAYWGQGTLVTVSSGGGGSG |
| | | | GGGSGGGGSQTVVTQEPSLTVSPGGTVTLTCGSSTGAVTSGNYPNWV |
| | | | QQKPGQAPRGLIGGTKFLAPGTPARFSGSLLGGKAALTLSGVQPEDE |
| | | | AEYYCVLWYSNRWVFGGGTKLTVL |
| 90. | MS_1xCD3- | Bispecific | QVQLVESGGGLVKPGGSLRLSCAASGFTFSDYYMTWIRQAPGKGLEW |
| | scFc | HLE | LSYISSSGSTIYYADSVKGRFTISRDNAKNSLFLQMNSLRAEDTAVY |
| | | molecule | YCARDRNSHFDYWGQGTLVTVSSGGGGSGGGGSGGGGSDIQMTQSPS |
| | | | SVSASVGDRVTITCRASQGINTWLAWYQQKPGKAPKLLIYGASGLQS |
| | | | GVPSRFSGSGSGTDFTLTISSLQPEDFATYYCQQAKSFPRTFGQGTK |
| | | | VEIKSGGGGSEVQLVESGGGLVQPGGSLKLSCAASGFTFNKYAMNWV |
| | | | RQAPGKGLEWVARIRSKYNNYATYYADSVKDRFTISRDDSKNTAYLQ |
| | | | MNNLKTEDTAVYYCVRHGNFGNSYISYWAYWGQGTLVTVSSGGGGSG |
| | | | GGGSGGGGSQTVVTQEPSLTVSPGGTVTLTCGSSTGAVTSGNYPNWV |
| | | | QQKPGQAPRGLIGGTKFLAPGTPARFSGSLLGGKAALTLSGVQPEDE |
| | | | AEYYCVLWYSNRWVFGGGTKLTVLGGGGDKTHTCPPCPAPELLGGPS |
| | | | VFLFPPKPKDTLMISRTPEVTCVVVDVSHEDPEVKFNWYVDGVEVHN |
| | | | AKTKPCEEQYGSTYRCVSVLTVLHQDWLNGKEYKCKVSNKALPAPIE |
| | | | KTISKAKGQPREPQVYTLPPSREEMTKNQVSLTCLVKGFYPSDIAVE |
| | | | WESNGQPENNYKTTPPVLDSDGSFFLYSKLTVDKSRWQQGNVFSCSV |
| | | | MHEALHNHYTQKSLSLSPGKGGGGSGGGGSGGGGSGGGGSGGGGSGG |
| | | | GGSDKTHTCPPCPAPELLGGPSVFLFPPKPKDTLMISRTPEVTCVVV |
| | | | DVSHEDPEVKFNWYVDGVEVHNAKTKPCEEQYGSTYRCVSVLTVLHQ |
| | | | DWLNGKEYKCKVSNKALPAPIEKTISKAKGQPREPQVYTLPPSREEM |
| | | | TKNQVSLTCLVKGFYPSDIAVEWESNGQPENNYKTTPPVLDSDGSFF |
| | | | LYSKLTVDKSRWQQGNVFSCSVMHEALHNHYTQKSLSLSPGK |
| 91. | MS_1xCD3- | Bispecific | QVQLVESGGGLVKPGGSLRLSCAASGFTFSDYYMTWIRQAPGKGLEW |
| | scFc_delGK | HLE | LSYISSSGSTIYYADSVKGRFTISRDNAKNSLFLQMNSLRAEDTAVY |
| | | molecule | YCARDRNSHFDYWGQGTLVTVSSGGGGSGGGGSGGGGSDIQMTQSPS |
| | | | SVSASVGDRVTITCRASQGINTWLAWYQQKPGKAPKLLIYGASGLQS |
| | | | GVPSRFSGSGSGTDFTLTISSLQPEDFATYYCQQAKSFPRTFGQGTK |
| | | | VEIKSGGGGSEVQLVESGGGLVQPGGSLKLSCAASGFTFNKYAMNWV |
| | | | RQAPGKGLEWVARIRSKYNNYATYYADSVKDRFTISRDDSKNTAYLQ |
| | | | MNNLKTEDTAVYYCVRHGNFGNSYISYWAYWGQGTLVTVSSGGGGSG |
| | | | GGGSGGGGSQTVVTQEPSLTVSPGGTVTLTCGSSTGAVTSGNYPNWV |
| | | | QQKPGQAPRGLIGGTKFLAPGTPARFSGSLLGGKAALTLSGVQPEDE |
| | | | AEYYCVLWYSNRWVFGGGTKLTVLGGGGDKTHTCPPCPAPELLGGPS |
| | | | VFLFPPKPKDTLMISRTPEVTCVVVDVSHEDPEVKFNWYVDGVEVHN |
| | | | AKTKPCEEQYGSTYRCVSVLTVLHQDWLNGKEYKCKVSNKALPAPIE |
| | | | KTISKAKGQPREPQVYTLPPSREEMTKNQVSLTCLVKGFYPSDIAVE |
| | | | WESNGQPENNYKTTPPVLDSDGSFFLYSKLTVDKSRWQQGNVFSCSV |
| | | | MHEALHNHYTQKSLSLSPGGGGSGGGGSGGGGSGGGGSGGGGSGGGG |
| | | | SDKTHTCPPCPAPELLGGPSVFLFPPKPKDTLMISRTPEVTCVVVDV |
| | | | SHEDPEVKFNWYVDGVEVHNAKTKPCEEQYGSTYRCVSVLTVLHQDW |
| | | | LNGKEYKCKVSNKALPAPIEKTISKAKGQPREPQVYTLPPSREEMTK |
| | | | NQVSLTCLVKGFYPSDIAVEWESNGQPENNYKTTPPVLDSDGSFFLY |
| | | | SKLTVDKSRWQQGNVFSCSVMHEALHNHYTQKSLSLSPGK |
| 92. | MS_1_ | VH | QVQLVESGGGLVKPGGSLRLSCAASGFTFSDYYMTWIRQAPGKCLEW |
| | CCxCD3-scFc | | LSYISSSGSTIYYADSVKGRFTISRDNAKNSLFLQMNSLRAEDTAVY |
| | | | YCARDRNSHFDYWGQGTLVTVSS |
| 93. | MS_1_ | VL | DIQMTQSPSSVSASVGDRVTITCRASQGINTWLAWYQQKPGKAPKLL |
| | CCxCD3-scFc | | IYGASGLQSGVPSRFSGSGSGTDFTLTISSLQPEDFATYYCQQAKSF |
| | | | PRTFGCGTKVEIK |
| 94. | MS_1_ | scFv | QVQLVESGGGLVKPGGSLRLSCAASGFTFSDYYMTWIRQAPGKCLEW |
| | CCxCD3-scFc | | LSYISSSGSTIYYADSVKGRFTISRDNAKNSLFLQMNSLRAEDTAVY |
| | | | YCARDRNSHFDYWGQGTLVTVSSGGGGSGGGGSGGGGSDIQMTQSPS |
| | | | SVSASVGDRVTITCRASQGINTWLAWYQQKPGKAPKLLIYGASGLQS |
| | | | GVPSRFSGSGSGTDFTLTISSLQPEDFATYYCQQAKSFPRTFGCGTK |
| | | | VEIK |
| 95. | MS_1_ | Bispecific | QVQLVESGGGLVKPGGSLRLSCAASGFTFSDYYMTWIRQAPGKCLEW |
| | CCxCD3-scFc | molecule | LSYISSSGSTIYYADSVKGRFTISRDNAKNSLFLQMNSLRAEDTAVY |
| | | | YCARDRNSHFDYWGQGTLVTVSSGGGGSGGGGSGGGGSDIQMTQSPS |
| | | | SVSASVGDRVTITCRASQGINTWLAWYQQKPGKAPKLLIYGASGLQS |
| | | | GVPSRFSGSGSGTDFTLTISSLQPEDFATYYCQQAKSFPRTFGCGTK |
| | | | VEIKSGGGGSEVQLVESGGGLVQPGGSLKLSCAASGFTFNKYAMNWV |
| | | | RQAPGKGLEWVARIRSKYNNYATYYADSVKDRFTISRDDSKNTAYLQ |
| | | | MNNLKTEDTAVYYCVRHGNFGNSYISYWAYWGQGTLVTVSSGGGGSG |
| | | | GGGSGGGGSQTVVTQEPSLTVSPGGTVTLTCGSSTGAVTSGNYPNWV |
| | | | QQKPGQAPRGLIGGTKFLAPGTPARFSGSLLGGKAALTLSGVQPEDE |
| | | | AEYYCVLWYSNRWVFGGGTKLTVL |
| 96. | MS_1_ | Bispecific | QVQLVESGGGLVKPGGSLRLSCAASGFTFSDYYMTWIRQAPGKCLEW |
| | CCxCD3-scFc | HLE | LSYISSSGSTIYYADSVKGRFTISRDNAKNSLFLQMNSLRAEDTAVY |
| | | molecule | YCARDRNSHFDYWGQGTLVTVSSGGGGSGGGGSGGGGSDIQMTQSPS |
| | | | SVSASVGDRVTITCRASQGINTWLAWYQQKPGKAPKLLIYGASGLQS |
| | | | GVPSRFSGSGSGTDFTLTISSLQPEDFATYYCQQAKSFPRTFGCGTK |
| | | | VEIKSGGGGSEVQLVESGGGLVQPGGSLKLSCAASGFTFNKYAMNWV |
| | | | RQAPGKGLEWVARIRSKYNNYATYYADSVKDRFTISRDDSKNTAYLQ |
| | | | MNNLKTEDTAVYYCVRHGNFGNSYISYWAYWGQGTLVTVSSGGGGSG |
| | | | GGGSGGGGSQTVVTQEPSLTVSPGGTVTLTCGSSTGAVTSGNYPNWV |
| | | | QQKPGQAPRGLIGGTKFLAPGTPARFSGSLLGGKAALTLSGVQPEDE |
| | | | AEYYCVLWYSNRWVFGGGTKLTVLGGGGDKTHTCPPCPAPELLGGPS |
| | | | VFLFPPKPKDTLMISRTPEVTCVVVDVSHEDPEVKFNWYVDGVEVHN |
| | | | AKTKPCEEQYGSTYRCVSVLTVLHQDWLNGKEYKCKVSNKALPAPIE |
| | | | KTISKAKGQPREPQVYTLPPSREEMTKNQVSLTCLVKGFYPSDIAVE |
| | | | WESNGQPENNYKTTPPVLDSDGSFFLYSKLTVDKSRWQQGNVFSCSV |
| | | | MHEALHNHYTQKSLSLSPGKGGGGSGGGGSGGGGSGGGGSGGGGSGG |
| | | | GGSDKTHTCPPCPAPELLGGPSVFLFPPKPKDTLMISRTPEVTCVVV |
| | | | DVSHEDPEVKFNWYVDGVEVHNAKTKPCEEQYGSTYRCVSVLTVLHQ |
| | | | DWLNGKEYKCKVSNKALPAPIEKTISKAKGQPREPQVYTLPPSREEM |
| | | | TKNQVSLTCLVKGFYPSDIAVEWESNGQPENNYKTTPPVLDSDGSFF |
| | | | LYSKLTVDKSRWQQGNVFSCSVMHEALHNHYTQKSLSLSPGK |
| 97. | MS_1_ | Bispecific | QVQLVESGGGLVKPGGSLRLSCAASGFTFSDYYMTWIRQAPGKCLEW |
| | CCxCD3- | HLE | LSYISSSGSTIYYADSVKGRFTISRDNAKNSLFLQMNSLRAEDTAVY |
| | scFc_delGK | molecule | YCARDRNSHFDYWGQGTLVTVSSGGGGSGGGGSGGGGSDIQMTQSPS |
| | | | SVSASVGDRVTITCRASQGINTWLAWYQQKPGKAPKLLIYGASGLQS |
| | | | GVPSRFSGSGSGTDFTLTISSLQPEDFATYYCQQAKSFPRTFGCGTK |
| | | | VEIKSGGGGSEVQLVESGGGLVQPGGSLKLSCAASGFTFNKYAMNWV |
| | | | RQAPGKGLEWVARIRSKYNNYATYYADSVKDRFTISRDDSKNTAYLQ |
| | | | MNNLKTEDTAVYYCVRHGNFGNSYISYWAYWGQGTLVTVSSGGGGSG |
| | | | GGGSGGGGSQTVVTQEPSLTVSPGGTVTLTCGSSTGAVTSGNYPNWV |
| | | | QQKPGQAPRGLIGGTKFLAPGTPARFSGSLLGGKAALTLSGVQPEDE |
| | | | AEYYCVLWYSNRWVFGGGTKLTVLGGGGDKTHTCPPCPAPELLGGPS |
| | | | VFLFPPKPKDTLMISRTPEVTCVVVDVSHEDPEVKFNWYVDGVEVHN |
| | | | AKTKPCEEQYGSTYRCVSVLTVLHQDWLNGKEYKCKVSNKALPAPIE |
| | | | KTISKAKGQPREPQVYTLPPSREEMTKNQVSLTCLVKGFYPSDIAVE |
| | | | WESNGQPENNYKTTPPVLDSDGSFFLYSKLTVDKSRWQQGNVFSCSV |
| | | | MHEALHNHYTQKSLSLSPGGGGSGGGGSGGGGSGGGGSGGGGSGGGG |
| | | | SDKTHTCPPCPAPELLGGPSVFLFPPKPKDTLMISRTPEVTCVVVDV |
| | | | SHEDPEVKFNWYVDGVEVHNAKTKPCEEQYGSTYRCVSVLTVLHQDW |
| | | | LNGKEYKCKVSNKALPAPIEKTISKAKGQPREPQVYTLPPSREEMTK |
| | | | NQVSLTCLVKGFYPSDIAVEWESNGQPENNYKTTPPVLDSDGSFFLY |
| | | | SKLTVDKSRWQQGNVFSCSVMHEALHNHYTQKSLSLSPGK |
| 98. | MS_2xCD3- | VH CDR1 | DYYMT |
| | scFc | | |
| 99. | MS_2xCD3- | VH CDR2 | YISSSGSTIYYADSVKG |
| | scFc | | |
| 100. | MS_2xCD3- | VH CDR3 | DRNSHFDY |
| | scFc | | |
| 101. | MS_2xCD3- | VL CDR1 | RASQGITRWLA |
| | scFc | | |
| 102. | MS_2xCD3- | VL CDR2 | AASVLQS |
| | scFc | | |
| 103. | MS_2xCD3- | VL CDR3 | QQSNSFPRT |
| | scFc | | |
| 104. | MS_2xCD3- | VH | QVQLVESGGGLVKPGGSLRLSCAASGFTFSDYYMTWIRQAPGKGLEW |
| | scFc | | ISYISSSGSTIYYADSVKGRFTISRDNAKNSLYLQMNSLRAEDTAVY |
| | | | YCARDRNSHFDYWGQGTLVTVSS |
| 105. | MS_2xCD3- | VL | DIQMTQSPSSVSASVGDRVTITCRASQGITRWLAWYQQKPGKAPKLL |
| | scFc | | IYAASVLQSGVPSRFSGSGSGTDFTLTISSLQPEDFATYYCQQSNSF |
| | | | PRTFGQGTKVEIK |
| 106. | MS_2xCD3- | scFv | QVQLVESGGGLVKPGGSLRLSCAASGFTFSDYYMTWIRQAPGKGLEW |
| | scFc | | ISYISSSGSTIYYADSVKGRFTISRDNAKNSLYLQMNSLRAEDTAVY |
| | | | YCARDRNSHFDYWGQGTLVTVSSGGGGSGGGGSGGGGSDIQMTQSPS |
| | | | SVSASVGDRVTITCRASQGITRWLAWYQQKPGKAPKLLIYAASVLQS |
| | | | GVPSRFSGSGSGTDFTLTISSLQPEDFATYYCQQSNSFPRTFGQGTK |
| | | | VEIK |
| 107. | MS_2xCD3- | Bispecific | QVQLVESGGGLVKPGGSLRLSCAASGFTFSDYYMTWIRQAPGKGLEW |
| | scFc | molecule | ISYISSSGSTIYYADSVKGRFTISRDNAKNSLYLQMNSLRAEDTAVY |
| | | | YCARDRNSHFDYWGQGTLVTVSSGGGGSGGGGSGGGGSDIQMTQSPS |
| | | | SVSASVGDRVTITCRASQGITRWLAWYQQKPGKAPKLLIYAASVLQS |
| | | | GVPSRFSGSGSGTDFTLTISSLQPEDFATYYCQQSNSFPRTFGQGTK |
| | | | VEIKSGGGGSEVQLVESGGGLVQPGGSLKLSCAASGFTFNKYAMNWV |
| | | | RQAPGKGLEWVARIRSKYNNYATYYADSVKDRFTISRDDSKNTAYLQ |
| | | | MNNLKTEDTAVYYCVRHGNFGNSYISYWAYWGQGTLVTVSSGGGGSG |
| | | | GGGSGGGGSQTVVTQEPSLTVSPGGTVTLTCGSSTGAVTSGNYPNWV |
| | | | QQKPGQAPRGLIGGTKFLAPGTPARFSGSLLGGKAALTLSGVQPEDE |
| | | | AEYYCVLWYSNRWVFGGGTKLTVL |
| 108. | MS_2xCD3- | Bispecific | QVQLVESGGGLVKPGGSLRLSCAASGFTFSDYYMTWIRQAPGKGLEW |
| | scFc | HLE | ISYISSSGSTIYYADSVKGRFTISRDNAKNSLYLQMNSLRAEDTAVY |
| | | molecule | YCARDRNSHFDYWGQGTLVTVSSGGGGSGGGGSGGGGSDIQMTQSPS |
| | | | SVSASVGDRVTITCRASQGITRWLAWYQQKPGKAPKLLIYAASVLQS |
| | | | GVPSRFSGSGSGTDFTLTISSLQPEDFATYYCQQSNSFPRTFGQGTK |
| | | | VEIKSGGGGSEVQLVESGGGLVQPGGSLKLSCAASGFTFNKYAMNWV |
| | | | RQAPGKGLEWVARIRSKYNNYATYYADSVKDRFTISRDDSKNTAYLQ |
| | | | MNNLKTEDTAVYYCVRHGNFGNSYISYWAYWGQGTLVTVSSGGGGSG |
| | | | GGGSGGGGSQTVVTQEPSLTVSPGGTVTLTCGSSTGAVTSGNYPNWV |
| | | | QQKPGQAPRGLIGGTKFLAPGTPARFSGSLLGGKAALTLSGVQPEDE |
| | | | AEYYCVLWYSNRWVFGGGTKLTVLGGGGDKTHTCPPCPAPELLGGPS |
| | | | VFLFPPKPKDTLMISRTPEVTCVVVDVSHEDPEVKFNWYVDGVEVHN |
| | | | AKTKPCEEQYGSTYRCVSVLTVLHQDWLNGKEYKCKVSNKALPAPIE |
| | | | KTISKAKGQPREPQVYTLPPSREEMTKNQVSLTCLVKGFYPSDIAVE |
| | | | WESNGQPENNYKTTPPVLDSDGSFFLYSKLTVDKSRWQQGNVFSCSV |
| | | | MHEALHNHYTQKSLSLSPGKGGGGSGGGGSGGGGSGGGGSGGGGSGG |
| | | | GGSDKTHTCPPCPAPELLGGPSVFLFPPKPKDTLMISRTPEVTCVVV |
| | | | DVSHEDPEVKFNWYVDGVEVHNAKTKPCEEQYGSTYRCVSVLTVLHQ |
| | | | DWLNGKEYKCKVSNKALPAPIEKTISKAKGQPREPQVYTLPPSREEM |
| | | | TKNQVSLTCLVKGFYPSDIAVEWESNGQPENNYKTTPPVLDSDGSFF |
| | | | LYSKLTVDKSRWQQGNVFSCSVMHEALHNHYTQKSLSLSPGK |
| 109. | MS_2xCD3- | Bispecific | QVQLVESGGGLVKPGGSLRLSCAASGFTFSDYYMTWIRQAPGKGLEW |
| | scFc_delGK | HLE | ISYISSSGSTIYYADSVKGRFTISRDNAKNSLYLQMNSLRAEDTAVY |
| | | molecule | YCARDRNSHFDYWGQGTLVTVSSGGGGSGGGGSGGGGSDIQMTQSPS |
| | | | SVSASVGDRVTITCRASQGITRWLAWYQQKPGKAPKLLIYAASVLQS |
| | | | GVPSRFSGSGSGTDFTLTISSLQPEDFATYYCQQSNSFPRTFGQGTK |
| | | | VEIKSGGGGSEVQLVESGGGLVQPGGSLKLSCAASGFTFNKYAMNWV |
| | | | RQAPGKGLEWVARIRSKYNNYATYYADSVKDRFTISRDDSKNTAYLQ |
| | | | MNNLKTEDTAVYYCVRHGNFGNSYISYWAYWGQGTLVTVSSGGGGSG |
| | | | GGGSGGGGSQTVVTQEPSLTVSPGGTVTLTCGSSTGAVTSGNYPNWV |
| | | | QQKPGQAPRGLIGGTKFLAPGTPARFSGSLLGGKAALTLSGVQPEDE |
| | | | AEYYCVLWYSNRWVFGGGTKLTVLGGGGDKTHTCPPCPAPELLGGPS |
| | | | VFLFPPKPKDTLMISRTPEVTCVVVDVSHEDPEVKFNWYVDGVEVHN |
| | | | AKTKPCEEQYGSTYRCVSVLTVLHQDWLNGKEYKCKVSNKALPAPIE |
| | | | KTISKAKGQPREPQVYTLPPSREEMTKNQVSLTCLVKGFYPSDIAVE |
| | | | WESNGQPENNYKTTPPVLDSDGSFFLYSKLTVDKSRWQQGNVFSCSV |
| | | | MHEALHNHYTQKSLSLSPGGGGSGGGGSGGGGSGGGGSGGGGSGGGG |
| | | | SDKTHTCPPCPAPELLGGPSVFLFPPKPKDTLMISRTPEVTCVVVDV |
| | | | SHEDPEVKFNWYVDGVEVHNAKTKPCEEQYGSTYRCVSVLTVLHQDW |
| | | | LNGKEYKCKVSNKALPAPIEKTISKAKGQPREPQVYTLPPSREEMTK |
| | | | NQVSLTCLVKGFYPSDIAVEWESNGQPENNYKTTPPVLDSDGSFFLY |
| | | | SKLTVDKSRWQQGNVFSCSVMHEALHNHYTQKSLSLSPGK |
| 110. | MS_2_ | VH | QVQLVESGGGLVKPGGSLRLSCAASGFTFSDYYMTWIRQAPGKCLEW |
| | CCxCD3-scFc | | ISYISSSGSTIYYADSVKGRFTISRDNAKNSLYLQMNSLRAEDTAVY |
| | | | YCARDRNSHFDYWGQGTLVTVSS |
| 111. | MS_2_ | VL | DIQMTQSPSSVSASVGDRVTITCRASQGITRWLAWYQQKPGKAPKLL |
| | CCxCD3-scFc | | IYAASVLQSGVPSRFSGSGSGTDFTLTISSLQPEDFATYYCQQSNSF |
| | | | PRTFGCGTKVEIK |
| 112. | MS_2_ | scFv | QVQLVESGGGLVKPGGSLRLSCAASGFTFSDYYMTWIRQAPGKCLEW |
| | CCxCD3-scFc | | ISYISSSGSTIYYADSVKGRFTISRDNAKNSLYLQMNSLRAEDTAVY |
| | | | YCARDRNSHFDYWGQGTLVTVSSGGGGSGGGGSGGGGSDIQMTQSPS |
| | | | SVSASVGDRVTITCRASQGITRWLAWYQQKPGKAPKLLIYAASVLQS |
| | | | GVPSRFSGSGSGTDFTLTISSLQPEDFATYYCQQSNSFPRTFGCGTK |
| | | | VEIK |
| 113. | MS_2_ | Bispecific | QVQLVESGGGLVKPGGSLRLSCAASGFTFSDYYMTWIRQAPGKCLEW |
| | CCxCD3-scFc | molecule | ISYISSSGSTIYYADSVKGRFTISRDNAKNSLYLQMNSLRAEDTAVY |
| | | | YCARDRNSHFDYWGQGTLVTVSSGGGGSGGGGSGGGGSDIQMTQSPS |
| | | | SVSASVGDRVTITCRASQGITRWLAWYQQKPGKAPKLLIYAASVLQS |
| | | | GVPSRFSGSGSGTDFTLTISSLQPEDFATYYCQQSNSFPRTFGCGTK |
| | | | VEIKSGGGGSEVQLVESGGGLVQPGGSLKLSCAASGFTFNKYAMNWV |
| | | | RQAPGKGLEWVARIRSKYNNYATYYADSVKDRFTISRDDSKNTAYLQ |
| | | | MNNLKTEDTAVYYCVRHGNFGNSYISYWAYWGQGTLVTVSSGGGGSG |
| | | | GGGSGGGGSQTVVTQEPSLTVSPGGTVTLTCGSSTGAVTSGNYPNWV |
| | | | QQKPGQAPRGLIGGTKFLAPGTPARFSGSLLGGKAALTLSGVQPEDE |
| | | | AEYYCVLWYSNRWVFGGGTKLTVL |
| 114. | MS_2_ | Bispecific | QVQLVESGGGLVKPGGSLRLSCAASGFTFSDYYMTWIRQAPGKCLEW |
| | CCxCD3-scFc | HLE | ISYISSSGSTIYYADSVKGRFTISRDNAKNSLYLQMNSLRAEDTAVY |
| | | molecule | YCARDRNSHFDYWGQGTLVTVSSGGGGSGGGGSGGGGSDIQMTQSPS |
| | | | SVSASVGDRVTITCRASQGITRWLAWYQQKPGKAPKLLIYAASVLQS |
| | | | GVPSRFSGSGSGTDFTLTISSLQPEDFATYYCQQSNSFPRTFGCGTK |
| | | | VEIKSGGGGSEVQLVESGGGLVQPGGSLKLSCAASGFTFNKYAMNWV |
| | | | RQAPGKGLEWVARIRSKYNNYATYYADSVKDRFTISRDDSKNTAYLQ |
| | | | MNNLKTEDTAVYYCVRHGNFGNSYISYWAYWGQGTLVTVSSGGGGSG |
| | | | GGGSGGGGSQTVVTQEPSLTVSPGGTVTLTCGSSTGAVTSGNYPNWV |
| | | | QQKPGQAPRGLIGGTKFLAPGTPARFSGSLLGGKAALTLSGVQPEDE |
| | | | AEYYCVLWYSNRWVFGGGTKLTVLGGGGDKTHTCPPCPAPELLGGPS |
| | | | VFLFPPKPKDTLMISRTPEVTCVVVDVSHEDPEVKFNWYVDGVEVHN |
| | | | AKTKPCEEQYGSTYRCVSVLTVLHQDWLNGKEYKCKVSNKALPAPIE |
| | | | KTISKAKGQPREPQVYTLPPSREEMTKNQVSLTCLVKGFYPSDIAVE |
| | | | WESNGQPENNYKTTPPVLDSDGSFFLYSKLTVDKSRWQQGNVFSCSV |
| | | | MHEALHNHYTQKSLSLSPGKGGGGSGGGGSGGGGSGGGGSGGGGSGG |
| | | | GGSDKTHTCPPCPAPELLGGPSVFLFPPKPKDTLMISRTPEVTCVVV |
| | | | DVSHEDPEVKFNWYVDGVEVHNAKTKPCEEQYGSTYRCVSVLTVLHQ |
| | | | DWLNGKEYKCKVSNKALPAPIEKTISKAKGQPREPQVYTLPPSREEM |
| | | | TKNQVSLTCLVKGFYPSDIAVEWESNGQPENNYKTTPPVLDSDGSFF |
| | | | LYSKLTVDKSRWQQGNVFSCSVMHEALHNHYTQKSLSLSPGK |
| 115. | MS_2_ | Bispecific | QVQLVESGGGLVKPGGSLRLSCAASGFTFSDYYMTWIRQAPGKCLEW |
| | CCxCD3- | HLE | ISYISSSGSTIYYADSVKGRFTISRDNAKNSLYLQMNSLRAEDTAVY |
| | scFc_delGK | molecule | YCARDRNSHFDYWGQGTLVTVSSGGGGSGGGGSGGGGSDIQMTQSPS |
| | | | SVSASVGDRVTITCRASQGITRWLAWYQQKPGKAPKLLIYAASVLQS |
| | | | GVPSRFSGSGSGTDFTLTISSLQPEDFATYYCQQSNSFPRTFGCGTK |
| | | | VEIKSGGGGSEVQLVESGGGLVQPGGSLKLSCAASGFTFNKYAMNWV |
| | | | RQAPGKGLEWVARIRSKYNNYATYYADSVKDRFTISRDDSKNTAYLQ |
| | | | MNNLKTEDTAVYYCVRHGNFGNSYISYWAYWGQGTLVTVSSGGGGSG |
| | | | GGGSGGGGSQTVVTQEPSLTVSPGGTVTLTCGSSTGAVTSGNYPNWV |
| | | | QQKPGQAPRGLIGGTKFLAPGTPARFSGSLLGGKAALTLSGVQPEDE |
| | | | AEYYCVLWYSNRWVFGGGTKLTVLGGGGDKTHTCPPCPAPELLGGPS |
| | | | VFLFPPKPKDTLMISRTPEVTCVVVDVSHEDPEVKFNWYVDGVEVHN |
| | | | AKTKPCEEQYGSTYRCVSVLTVLHQDWLNGKEYKCKVSNKALPAPIE |
| | | | KTISKAKGQPREPQVYTLPPSREEMTKNQVSLTCLVKGFYPSDIAVE |
| | | | WESNGQPENNYKTTPPVLDSDGSFFLYSKLTVDKSRWQQGNVFSCSV |
| | | | MHEALHNHYTQKSLSLSPGGGGSGGGGSGGGGSGGGGSGGGGSGGGG |
| | | | SDKTHTCPPCPAPELLGGPSVFLFPPKPKDTLMISRTPEVTCVVVDV |
| | | | SHEDPEVKFNWYVDGVEVHNAKTKPCEEQYGSTYRCVSVLTVLHQDW |
| | | | LNGKEYKCKVSNKALPAPIEKTISKAKGQPREPQVYTLPPSREEMTK |
| | | | NQVSLTCLVKGFYPSDIAVEWESNGQPENNYKTTPPVLDSDGSFFLY |
| | | | SKLTVDKSRWQQGNVFSCSVMHEALHNHYTQKSLSLSPGK |
| 116. | MS_3xCD3- | VH CDR1 | DHYMS |
| | scFc | | |
| 117. | MS_3xCD3- | VH CDR2 | YISSSGGIIYYADSVKG |
| | scFc | | |
| 118. | MS_3xCD3- | VH CDR3 | DVGSHFDY |
| | scFc | | |
| 119. | MS_3xCD3- | VL CDR1 | RASQDISRWLA |
| | scFc | | |
| 120. | MS_3xCD3- | VL CDR2 | AASRLQS |
| | scFc | | |
| 121. | MS_3xCD3- | VL CDR3 | QQAKSFPRT |
| | scFc | | |
| 122. | MS_3xCD3- | VH | QVQLVESGGGLVKPGGSLRLSCAASGFTFSDHYMSWIRQAPGKGLEW |
| | scFc | | FSYISSSGGIIYYADSVKGRFTISRDNAKNSLYLQMNSLRAEDTAVY |
| | | | YCARDVGSHFDYWGQGTLVTVSS |
| 123. | MS_3xCD3- | VL | DIQMTQSPSSVSASVGDRVTITCRASQDISRWLAWYQQKPGKAPKLL |
| | scFc | | ISAASRLQSGVPSRFSGSGSGTDFTLTISSLQPEDFAIYYCQQAKSF |
| | | | PRTFGQGTKVEIK |
| 124. | MS_3xCD3- | scFv | QVQLVESGGGLVKPGGSLRLSCAASGFTFSDHYMSWIRQAPGKGLEW |
| | scFc | | FSYISSSGGIIYYADSVKGRFTISRDNAKNSLYLQMNSLRAEDTAVY |
| | | | YCARDVGSHFDYWGQGTLVTVSSGGGGSGGGGSGGGGSDIQMTQSPS |
| | | | SVSASVGDRVTITCRASQDISRWLAWYQQKPGKAPKLLISAASRLQS |
| | | | GVPSRFSGSGSGTDFTLTISSLQPEDFAIYYCQQAKSFPRTFGQGTK |
| | | | VEIK |
| 125. | MS_3xCD3- | Bispecific | QVQLVESGGGLVKPGGSLRLSCAASGFTFSDHYMSWIRQAPGKGLEW |
| | scFc | molecule | FSYISSSGGIIYYADSVKGRFTISRDNAKNSLYLQMNSLRAEDTAVY |
| | | | YCARDVGSHFDYWGQGTLVTVSSGGGGSGGGGSGGGGSDIQMTQSPS |
| | | | SVSASVGDRVTITCRASQDISRWLAWYQQKPGKAPKLLISAASRLQS |
| | | | GVPSRFSGSGSGTDFTLTISSLQPEDFAIYYCQQAKSFPRTFGQGTK |
| | | | VEIKSGGGGSEVQLVESGGGLVQPGGSLKLSCAASGFTFNKYAMNWV |
| | | | RQAPGKGLEWVARIRSKYNNYATYYADSVKDRFTISRDDSKNTAYLQ |
| | | | MNNLKTEDTAVYYCVRHGNFGNSYISYWAYWGQGTLVTVSSGGGGSG |
| | | | GGGSGGGGSQTVVTQEPSLTVSPGGTVTLTCGSSTGAVTSGNYPNWV |
| | | | QQKPGQAPRGLIGGTKFLAPGTPARFSGSLLGGKAALTLSGVQPEDE |
| | | | AEYYCVLWYSNRWVFGGGTKLTVL |
| 126. | MS_3xCD3- | Bispecific | QVQLVESGGGLVKPGGSLRLSCAASGFTFSDHYMSWIRQAPGKGLEW |
| | scFc | HLE | FSYISSSGGIIYYADSVKGRFTISRDNAKNSLYLQMNSLRAEDTAVY |
| | | molecule | YCARDVGSHFDYWGQGTLVTVSSGGGGSGGGGSGGGGSDIQMTQSPS |
| | | | SVSASVGDRVTITCRASQDISRWLAWYQQKPGKAPKLLISAASRLQS |
| | | | GVPSRFSGSGSGTDFTLTISSLQPEDFAIYYCQQAKSFPRTFGQGTK |
| | | | VEIKSGGGGSEVQLVESGGGLVQPGGSLKLSCAASGFTFNKYAMNWV |
| | | | RQAPGKGLEWVARIRSKYNNYATYYADSVKDRFTISRDDSKNTAYLQ |
| | | | MNNLKTEDTAVYYCVRHGNFGNSYISYWAYWGQGTLVTVSSGGGGSG |
| | | | GGGSGGGGSQTVVTQEPSLTVSPGGTVTLTCGSSTGAVTSGNYPNWV |
| | | | QQKPGQAPRGLIGGTKFLAPGTPARFSGSLLGGKAALTLSGVQPEDE |
| | | | AEYYCVLWYSNRWVFGGGTKLTVLGGGGDKTHTCPPCPAPELLGGPS |
| | | | VFLFPPKPKDTLMISRTPEVTCVVVDVSHEDPEVKFNWYVDGVEVHN |
| | | | AKTKPCEEQYGSTYRCVSVLTVLHQDWLNGKEYKCKVSNKALPAPIE |
| | | | KTISKAKGQPREPQVYTLPPSREEMTKNQVSLTCLVKGFYPSDIAVE |
| | | | WESNGQPENNYKTTPPVLDSDGSFFLYSKLTVDKSRWQQGNVFSCSV |
| | | | MHEALHNHYTQKSLSLSPGKGGGGSGGGGSGGGGSGGGGSGGGGSGG |
| | | | GGSDKTHTCPPCPAPELLGGPSVFLFPPKPKDTLMISRTPEVTCVVV |
| | | | DVSHEDPEVKFNWYVDGVEVHNAKTKPCEEQYGSTYRCVSVLTVLHQ |
| | | | DWLNGKEYKCKVSNKALPAPIEKTISKAKGQPREPQVYTLPPSREEM |
| | | | TKNQVSLTCLVKGFYPSDIAVEWESNGQPENNYKTTPPVLDSDGSFF |
| | | | LYSKLTVDKSRWQQGNVFSCSVMHEALHNHYTQKSLSLSPGK |
| 127. | MS_3xCD3- | Bispecific | QVQLVESGGGLVKPGGSLRLSCAASGFTFSDHYMSWIRQAPGKGLEW |
| | scFc_delGK | HLE | FSYISSSGGIIYYADSVKGRFTISRDNAKNSLYLQMNSLRAEDTAVY |
| | | molecule | YCARDVGSHFDYWGQGTLVTVSSGGGGSGGGGSGGGGSDIQMTQSPS |
| | | | SVSASVGDRVTITCRASQDISRWLAWYQQKPGKAPKLLISAASRLQS |
| | | | GVPSRFSGSGSGTDFTLTISSLQPEDFAIYYCQQAKSFPRTFGQGTK |
| | | | VEIKSGGGGSEVQLVESGGGLVQPGGSLKLSCAASGFTFNKYAMNWV |
| | | | RQAPGKGLEWVARIRSKYNNYATYYADSVKDRFTISRDDSKNTAYLQ |
| | | | MNNLKTEDTAVYYCVRHGNFGNSYISYWAYWGQGTLVTVSSGGGGSG |
| | | | GGGSGGGGSQTVVTQEPSLTVSPGGTVTLTCGSSTGAVTSGNYPNWV |
| | | | QQKPGQAPRGLIGGTKFLAPGTPARFSGSLLGGKAALTLSGVQPEDE |
| | | | AEYYCVLWYSNRWVFGGGTKLTVLGGGGDKTHTCPPCPAPELLGGPS |
| | | | VFLFPPKPKDTLMISRTPEVTCVVVDVSHEDPEVKFNWYVDGVEVHN |
| | | | AKTKPCEEQYGSTYRCVSVLTVLHQDWLNGKEYKCKVSNKALPAPIE |
| | | | KTISKAKGQPREPQVYTLPPSREEMTKNQVSLTCLVKGFYPSDIAVE |
| | | | WESNGQPENNYKTTPPVLDSDGSFFLYSKLTVDKSRWQQGNVFSCSV |
| | | | MHEALHNHYTQKSLSLSPGGGGSGGGGSGGGGSGGGGSGGGGSGGGG |
| | | | SDKTHTCPPCPAPELLGGPSVFLFPPKPKDTLMISRTPEVTCVVVDV |
| | | | SHEDPEVKFNWYVDGVEVHNAKTKPCEEQYGSTYRCVSVLTVLHQDW |
| | | | LNGKEYKCKVSNKALPAPIEKTISKAKGQPREPQVYTLPPSREEMTK |
| | | | NQVSLTCLVKGFYPSDIAVEWESNGQPENNYKTTPPVLDSDGSFFLY |
| | | | SKLTVDKSRWQQGNVFSCSVMHEALHNHYTQKSLSLSPGK |
| 128. | MS_3_ | VH | QVQLVESGGGLVKPGGSLRLSCAASGFTFSDHYMSWIRQAPGKCLEW |
| | CCxCD3-scFc | | FSYISSSGGIIYYADSVKGRFTISRDNAKNSLYLQMNSLRAEDTAVY |
| | | | YCARDVGSHFDYWGQGTLVTVSS |
| 129. | MS_3_C | VL | DIQMTQSPSSVSASVGDRVTITCRASQDISRWLAWYQQKPGKAPKLL |
| | CxCD3-scFc | | ISAASRLQSGVPSRFSGSGSGTDFTLTISSLQPEDFAIYYCQQAKSF |
| | | | PRTFGCGTKVEIK |
| 130. | MS_3_ | scFv | QVQLVESGGGLVKPGGSLRLSCAASGFTFSDHYMSWIRQAPGKCLEW |
| | CCxCD3-scFc | | FSYISSSGGIIYYADSVKGRFTISRDNAKNSLYLQMNSLRAEDTAVY |
| | | | YCARDVGSHFDYWGQGTLVTVSSGGGGSGGGGSGGGGSDIQMTQSPS |
| | | | SVSASVGDRVTITCRASQDISRWLAWYQQKPGKAPKLLISAASRLQS |
| | | | GVPSRFSGSGSGTDFTLTISSLQPEDFAIYYCQQAKSFPRTFGCGTK |
| | | | VEIK |
| 131. | MS_3_ | bispecific | QVQLVESGGGLVKPGGSLRLSCAASGFTFSDHYMSWIRQAPGKCLEW |
| | CCxCD3-scFc | molecule | FSYISSSGGIIYYADSVKGRFTISRDNAKNSLYLQMNSLRAEDTAVY |
| | | | YCARDVGSHFDYWGQGTLVTVSSGGGGSGGGGSGGGGSDIQMTQSPS |
| | | | SVSASVGDRVTITCRASQDISRWLAWYQQKPGKAPKLLISAASRLQS |
| | | | GVPSRFSGSGSGTDFTLTISSLQPEDFAIYYCQQAKSFPRTFGCGTK |
| | | | VEIKSGGGGSEVQLVESGGGLVQPGGSLKLSCAASGFTFNKYAMNWV |
| | | | RQAPGKGLEWVARIRSKYNNYATYYADSVKDRFTISRDDSKNTAYLQ |
| | | | MNNLKTEDTAVYYCVRHGNFGNSYISYWAYWGQGTLVTVSSGGGGSG |
| | | | GGGSGGGGSQTVVTQEPSLTVSPGGTVTLTCGSSTGAVTSGNYPNWV |
| | | | QQKPGQAPRGLIGGTKFLAPGTPARFSGSLLGGKAALTLSGVQPEDE |
| | | | AEYYCVLWYSNRWVFGGGTKLTVL |
| 132. | MS_3_ | Bispecific | QVQLVESGGGLVKPGGSLRLSCAASGFTFSDHYMSWIRQAPGKCLEW |
| | CCxCD3-scFc | HLE | FSYISSSGGIIYYADSVKGRFTISRDNAKNSLYLQMNSLRAEDTAVY |
| | | molecule | YCARDVGSHFDYWGQGTLVTVSSGGGGSGGGGSGGGGSDIQMTQSPS |
| | | | SVSASVGDRVTITCRASQDISRWLAWYQQKPGKAPKLLISAASRLQS |
| | | | GVPSRFSGSGSGTDFTLTISSLQPEDFAIYYCQQAKSFPRTFGCGTK |
| | | | VEIKSGGGGSEVQLVESGGGLVQPGGSLKLSCAASGFTFNKYAMNWV |
| | | | RQAPGKGLEWVARIRSKYNNYATYYADSVKDRFTISRDDSKNTAYLQ |
| | | | MNNLKTEDTAVYYCVRHGNFGNSYISYWAYWGQGTLVTVSSGGGGSG |
| | | | GGGSGGGGSQTVVTQEPSLTVSPGGTVTLTCGSSTGAVTSGNYPNWV |
| | | | QQKPGQAPRGLIGGTKFLAPGTPARFSGSLLGGKAALTLSGVQPEDE |
| | | | AEYYCVLWYSNRWVFGGGTKLTVLGGGGDKTHTCPPCPAPELLGGPS |
| | | | VFLFPPKPKDTLMISRTPEVTCVVVDVSHEDPEVKFNWYVDGVEVHN |
| | | | AKTKPCEEQYGSTYRCVSVLTVLHQDWLNGKEYKCKVSNKALPAPIE |
| | | | KTISKAKGQPREPQVYTLPPSREEMTKNQVSLTCLVKGFYPSDIAVE |
| | | | WESNGQPENNYKTTPPVLDSDGSFFLYSKLTVDKSRWQQGNVFSCSV |
| | | | MHEALHNHYTQKSLSLSPGKGGGGSGGGGSGGGGSGGGGSGGGGSGG |
| | | | GGSDKTHTCPPCPAPELLGGPSVFLFPPKPKDTLMISRTPEVTCVVV |
| | | | DVSHEDPEVKFNWYVDGVEVHNAKTKPCEEQYGSTYRCVSVLTVLHQ |
| | | | DWLNGKEYKCKVSNKALPAPIEKTISKAKGQPREPQVYTLPPSREEM |
| | | | TKNQVSLTCLVKGFYPSDIAVEWESNGQPENNYKTTPPVLDSDGSFF |
| | | | LYSKLTVDKSRWQQGNVFSCSVMHEALHNHYTQKSLSLSPGK |
| 133. | MS_3_ | Bispecific | QVQLVESGGGLVKPGGSLRLSCAASGFTFSDHYMSWIRQAPGKCLEW |
| | CCxCD3- | HLE | FSYISSSGGIIYYADSVKGRFTISRDNAKNSLYLQMNSLRAEDTAVY |
| | scFc_delGK | molecule | YCARDVGSHFDYWGQGTLVTVSSGGGGSGGGGSGGGGSDIQMTQSPS |
| | | | SVSASVGDRVTITCRASQDISRWLAWYQQKPGKAPKLLISAASRLQS |
| | | | GVPSRFSGSGSGTDFTLTISSLQPEDFAIYYCQQAKSFPRTFGCGTK |
| | | | VEIKSGGGGSEVQLVESGGGLVQPGGSLKLSCAASGFTFNKYAMNWV |
| | | | RQAPGKGLEWVARIRSKYNNYATYYADSVKDRFTISRDDSKNTAYLQ |
| | | | MNNLKTEDTAVYYCVRHGNFGNSYISYWAYWGQGTLVTVSSGGGGSG |
| | | | GGGSGGGGSQTVVTQEPSLTVSPGGTVTLTCGSSTGAVTSGNYPNWV |
| | | | QQKPGQAPRGLIGGTKFLAPGTPARFSGSLLGGKAALTLSGVQPEDE |
| | | | AEYYCVLWYSNRWVFGGGTKLTVLGGGGDKTHTCPPCPAPELLGGPS |
| | | | VFLFPPKPKDTLMISRTPEVTCVVVDVSHEDPEVKFNWYVDGVEVHN |
| | | | AKTKPCEEQYGSTYRCVSVLTVLHQDWLNGKEYKCKVSNKALPAPIE |
| | | | KTISKAKGQPREPQVYTLPPSREEMTKNQVSLTCLVKGFYPSDIAVE |
| | | | WESNGQPENNYKTTPPVLDSDGSFFLYSKLTVDKSRWQQGNVFSCSV |
| | | | MHEALHNHYTQKSLSLSPGGGGSGGGGSGGGGSGGGGSGGGGSGGGG |
| | | | SDKTHTCPPCPAPELLGGPSVFLFPPKPKDTLMISRTPEVTCVVVDV |
| | | | SHEDPEVKFNWYVDGVEVHNAKTKPCEEQYGSTYRCVSVLTVLHQDW |
| | | | LNGKEYKCKVSNKALPAPIEKTISKAKGQPREPQVYTLPPSREEMTK |
| | | | NQVSLTCLVKGFYPSDIAVEWESNGQPENNYKTTPPVLDSDGSFFLY |
| | | | SKLTVDKSRWQQGNVFSCSVMHEALHNHYTQKSLSLSPGK |
| 134. | CH_1xCD3- | VH CDR1 | SYGMH |
| | scFc | | |
| 135. | CH_1xCD3- | VH CDR2 | FIWYDGSNKYYADSVKD |
| | scFc | | |
| 136. | CH_1xCD3- | VH CDR3 | RAGIIGTIGYYYGMDV |
| | scFc | | |
| 137. | CH_1xCD3- | VL CDR1 | SGDRLGEKYTS |
| | scFc | | |
| 138. | CH_1xCD3- | VL CDR2 | QDTKRPS |
| | scFc | | |
| 139. | CH_1xCD3- | VL CDR3 | QAWESSTVV |
| | scFc | | |
| 140. | CH_1xCD3- | VH | QVQLVESGGGVVQPGGSLRLSCAASGFTFSSYGMHWVRQAPGKGLEW |
| | scFc | | VAFIWYDGSNKYYADSVKDRFTISRDNSKNTLYLQMNSLRAEDTAVY |
| | | | YCARRAGIIGTIGYYYGMDVWGQGTTVTVSS |
| 141. | CH_1xCD3- | VL | SYELTQPPSVSVSPGQTASITCSGDRLGEKYTSWYQQRPGQSPLLVI |
| | scFc | | YQDTKRPSGIPERFSGSNSGNTATLTISGTQAMDEADYYCQAWESST |
| | | | VVFGGGTKLTVL |
| 142. | CH_1xCD3- | scFv | QVQLVESGGGVVQPGGSLRLSCAASGFTFSSYGMHWVRQAPGKGLEW |
| | scFc | | VAFIWYDGSNKYYADSVKDRFTISRDNSKNTLYLQMNSLRAEDTAVY |
| | | | YCARRAGIIGTIGYYYGMDVWGQGTTVTVSSGGGGSGGGGSGGGGSS |
| | | | YELTQPPSVSVSPGQTASITCSGDRLGEKYTSWYQQRPGQSPLLVIY |
| | | | QDTKRPSGIPERFSGSNSGNTATLTISGTQAMDEADYYCQAWESSTV |
| | | | VFGGGTKLTVL |
| 143. | CH_1xCD3- | Bispecific | QVQLVESGGGVVQPGGSLRLSCAASGFTFSSYGMHWVRQAPGKGLEW |
| | scFc | molecule | VAFIWYDGSNKYYADSVKDRFTISRDNSKNTLYLQMNSLRAEDTAVY |
| | | | YCARRAGIIGTIGYYYGMDVWGQGTTVTVSSGGGGSGGGGSGGGGSS |
| | | | YELTQPPSVSVSPGQTASITCSGDRLGEKYTSWYQQRPGQSPLLVIY |
| | | | QDTKRPSGIPERFSGSNSGNTATLTISGTQAMDEADYYCQAWESSTV |
| | | | VFGGGTKLTVLSGGGGSEVQLVESGGGLVQPGGSLKLSCAASGFTFN |
| | | | KYAMNWVRQAPGKGLEWVARIRSKYNNYATYYADSVKDRFTISRDDS |
| | | | KNTAYLQMNNLKTEDTAVYYCVRHGNFGNSYISYWAYWGQGTLVTVS |
| | | | SGGGGSGGGGSGGGGSQTVVTQEPSLTVSPGGTVTLTCGSSTGAVTS |
| | | | GNYPNWVQQKPGQAPRGLIGGTKFLAPGTPARFSGSLLGGKAALTLS |
| | | | GVQPEDEAEYYCVLWYSNRWVFGGGTKLTVL |
| 144. | CH_1xCD3- | Bispecific | QVQLVESGGGVVQPGGSLRLSCAASGFTFSSYGMHWVRQAPGKGLEW |
| | scFc | HLE | VAFIWYDGSNKYYADSVKDRFTISRDNSKNTLYLQMNSLRAEDTAVY |
| | | molecule | YCARRAGIIGTIGYYYGMDVWGQGTTVTVSSGGGGSGGGGSGGGGSS |
| | | | YELTQPPSVSVSPGQTASITCSGDRLGEKYTSWYQQRPGQSPLLVIY |
| | | | QDTKRPSGIPERFSGSNSGNTATLTISGTQAMDEADYYCQAWESSTV |
| | | | VFGGGTKLTVLSGGGGSEVQLVESGGGLVQPGGSLKLSCAASGFTFN |
| | | | KYAMNWVRQAPGKGLEWVARIRSKYNNYATYYADSVKDRFTISRDDS |
| | | | KNTAYLQMNNLKTEDTAVYYCVRHGNFGNSYISYWAYWGQGTLVTVS |
| | | | SGGGGSGGGGSGGGGSQTVVTQEPSLTVSPGGTVTLTCGSSTGAVTS |
| | | | GNYPNWVQQKPGQAPRGLIGGTKFLAPGTPARFSGSLLGGKAALTLS |
| | | | GVQPEDEAEYYCVLWYSNRWVFGGGTKLTVLGGGGDKTHTCPPCPAP |
| | | | ELLGGPSVFLFPPKPKDTLMISRTPEVTCVVVDVSHEDPEVKFNWYV |
| | | | DGVEVHNAKTKPCEEQYGSTYRCVSVLTVLHQDWLNGKEYKCKVSNK |
| | | | ALPAPIEKTISKAKGQPREPQVYTLPPSREEMTKNQVSLTCLVKGFY |
| | | | PSDIAVEWESNGQPENNYKTTPPVLDSDGSFFLYSKLTVDKSRWQQG |
| | | | NVFSCSVMHEALHNHYTQKSLSLSPGKGGGGSGGGGSGGGGSGGGGS |
| | | | GGGGSGGGGSDKTHTCPPCPAPELLGGPSVFLFPPKPKDTLMISRTP |
| | | | EVTCVVVDVSHEDPEVKFNWYVDGVEVHNAKTKPCEEQYGSTYRCVS |
| | | | VLTVLHQDWLNGKEYKCKVSNKALPAPIEKTISKAKGQPREPQVYTL |
| | | | PPSREEMTKNQVSLTCLVKGFYPSDIAVEWESNGQPENNYKTTPPVL |
| | | | DSDGSFFLYSKLTVDKSRWQQGNVFSCSVMHEALHNHYTQKSLSLSP |
| | | | GK |
| 145. | CH_1xCD3- | Bispecific | QVQLVESGGGVVQPGGSLRLSCAASGFTFSSYGMHWVRQAPGKGLEW |
| | scFcdeGK | HLE | VAFIWYDGSNKYYADSVKDRFTISRDNSKNTLYLQMNSLRAEDTAVY |
| | | molecule | YCARRAGIIGTIGYYYGMDVWGQGTTVTVSSGGGGSGGGGSGGGGSS |
| | | | YELTQPPSVSVSPGQTASITCSGDRLGEKYTSWYQQRPGQSPLLVIY |
| | | | QDTKRPSGIPERFSGSNSGNTATLTISGTQAMDEADYYCQAWESSTV |
| | | | VFGGGTKLTVLSGGGGSEVQLVESGGGLVQPGGSLKLSCAASGFTFN |
| | | | KYAMNWVRQAPGKGLEWVARIRSKYNNYATYYADSVKDRFTISRDDS |
| | | | KNTAYLQMNNLKTEDTAVYYCVRHGNFGNSYISYWAYWGQGTLVTVS |
| | | | SGGGGSGGGGSGGGGSQTVVTQEPSLTVSPGGTVTLTCGSSTGAVTS |
| | | | GNYPNWVQQKPGQAPRGLIGGTKFLAPGTPARFSGSLLGGKAALTLS |
| | | | GVQPEDEAEYYCVLWYSNRWVFGGGTKLTVLGGGGDKTHTCPPCPAP |
| | | | ELLGGPSVFLFPPKPKDTLMISRTPEVTCVVVDVSHEDPEVKFNWYV |
| | | | DGVEVHNAKTKPCEEQYGSTYRCVSVLTVLHQDWLNGKEYKCKVSNK |
| | | | ALPAPIEKTISKAKGQPREPQVYTLPPSREEMTKNQVSLTCLVKGFY |
| | | | PSDIAVEWESNGQPENNYKTTPPVLDSDGSFFLYSKLTVDKSRWQQG |
| | | | NVFSCSVMHEALHNHYTQKSLSLSPGGGGSGGGGSGGGGSGGGGSGG |
| | | | GGSGGGGSDKTHTCPPCPAPELLGGPSVFLFPPKPKDTLMISRTPEV |
| | | | TCVVVDVSHEDPEVKFNWYVDGVEVHNAKTKPCEEQYGSTYRCVSVL |
| | | | TVLHQDWLNGKEYKCKVSNKALPAPIEKTISKAKGQPREPQVYTLPP |
| | | | SREEMTKNQVSLTCLVKGFYPSDIAVEWESNGQPENNYKTTPPVLDS |
| | | | DGSFFLYSKLTVDKSRWQQGNVFSCSVMHEALHNHYTQKSLSLSPGK |
| 146. | CH_1_CCxCD | VH | QVQLVESGGGVVQPGGSLRLSCAASGFTFSSYGMHWVRQAPGKCLEW |
| | 3-scFc | | VAFIWYDGSNKYYADSVKDRFTISRDNSKNTLYLQMNSLRAEDTAVY |
| | | | YCARRAGIIGTIGYYYGMDVWGQGTTVTVSS |
| 147. | CH_1_CCxCD | VL | SYELTQPPSVSVSPGQTASITCSGDRLGEKYTSWYQQRPGQSPLLVI |
| | 3-scFc | | YQDTKRPSGIPERFSGSNSGNTATLTISGTQAMDEADYYCQAWESST |
| | | | VVFGCGTKLTVL |
| 148. | CH_1_CCxCD | scFv | QVQLVESGGGVVQPGGSLRLSCAASGFTFSSYGMHWVRQAPGKCLEW |
| | 3-scFc | | VAFIWYDGSNKYYADSVKDRFTISRDNSKNTLYLQMNSLRAEDTAVY |
| | | | YCARRAGIIGTIGYYYGMDVWGQGTTVTVSSGGGGSGGGGSGGGGSS |
| | | | YELTQPPSVSVSPGQTASITCSGDRLGEKYTSWYQQRPGQSPLLVIY |
| | | | QDTKRPSGIPERFSGSNSGNTATLTISGTQAMDEADYYCQAWESSTV |
| | | | VFGCGTKLTVL |
| 149. | CH_1_CCxCD | Bispecific | QVQLVESGGGVVQPGGSLRLSCAASGFTFSSYGMHWVRQAPGKCLEW |
| | 3-scFc | molecule | VAFIWYDGSNKYYADSVKDRFTISRDNSKNTLYLQMNSLRAEDTAVY |
| | | | YCARRAGIIGTIGYYYGMDVWGQGTTVTVSSGGGGSGGGGSGGGGSS |
| | | | YELTQPPSVSVSPGQTASITCSGDRLGEKYTSWYQQRPGQSPLLVIY |
| | | | QDTKRPSGIPERFSGSNSGNTATLTISGTQAMDEADYYCQAWESSTV |
| | | | VFGCGTKLTVLSGGGGSEVQLVESGGGLVQPGGSLKLSCAASGFTFN |
| | | | KYAMNWVRQAPGKGLEWVARIRSKYNNYATYYADSVKDRFTISRDDS |
| | | | KNTAYLQMNNLKTEDTAVYYCVRHGNFGNSYISYWAYWGQGTLVTVS |
| | | | SGGGGSGGGGSGGGGSQTVVTQEPSLTVSPGGTVTLTCGSSTGAVTS |
| | | | GNYPNWVQQKPGQAPRGLIGGTKFLAPGTPARFSGSLLGGKAALTLS |
| | | | GVQPEDEAEYYCVLWYSNRWVFGGGTKLTVL |
| 150. | CH_1_CCxCD | Bispecific | QVQLVESGGGVVQPGGSLRLSCAASGFTFSSYGMHWVRQAPGKCLEW |
| | 3-scFc | HLE | VAFIWYDGSNKYYADSVKDRFTISRDNSKNTLYLQMNSLRAEDTAVY |
| | | molecule | YCARRAGIIGTIGYYYGMDVWGQGTTVTVSSGGGGSGGGGSGGGGSS |
| | | | YELTQPPSVSVSPGQTASITCSGDRLGEKYTSWYQQRPGQSPLLVIY |
| | | | QDTKRPSGIPERFSGSNSGNTATLTISGTQAMDEADYYCQAWESSTV |
| | | | VFGCGTKLTVLSGGGGSEVQLVESGGGLVQPGGSLKLSCAASGFTFN |
| | | | KYAMNWVRQAPGKGLEWVARIRSKYNNYATYYADSVKDRFTISRDDS |
| | | | KNTAYLQMNNLKTEDTAVYYCVRHGNFGNSYISYWAYWGQGTLVTVS |
| | | | SGGGGSGGGGSGGGGSQTVVTQEPSLTVSPGGTVTLTCGSSTGAVTS |
| | | | GNYPNWVQQKPGQAPRGLIGGTKFLAPGTPARFSGSLLGGKAALTLS |
| | | | GVQPEDEAEYYCVLWYSNRWVFGGGTKLTVLGGGGDKTHTCPPCPAP |
| | | | ELLGGPSVFLFPPKPKDTLMISRTPEVTCVVVDVSHEDPEVKFNWYV |
| | | | DGVEVHNAKTKPCEEQYGSTYRCVSVLTVLHQDWLNGKEYKCKVSNK |
| | | | ALPAPIEKTISKAKGQPREPQVYTLPPSREEMTKNQVSLTCLVKGFY |
| | | | PSDIAVEWESNGQPENNYKTTPPVLDSDGSFFLYSKLTVDKSRWQQG |
| | | | NVFSCSVMHEALHNHYTQKSLSLSPGKGGGGSGGGGSGGGGSGGGGS |
| | | | GGGGSGGGGSDKTHTCPPCPAPELLGGPSVFLFPPKPKDTLMISRTP |
| | | | EVTCVVVDVSHEDPEVKFNWYVDGVEVHNAKTKPCEEQYGSTYRCVS |
| | | | VLTVLHQDWLNGKEYKCKVSNKALPAPIEKTISKAKGQPREPQVYTL |
| | | | PPSREEMTKNQVSLTCLVKGFYPSDIAVEWESNGQPENNYKTTPPVL |
| | | | DSDGSFFLYSKLTVDKSRWQQGNVFSCSVMHEALHNHYTQKSLSLSP |
| | | | GK |
| 151. | CH_1_CCxCD | Bispecific | QVQLVESGGGVVQPGGSLRLSCAASGFTFSSYGMHWVRQAPGKCLEW |
| | 3-scFcdelGK | HLE | VAFIWYDGSNKYYADSVKDRFTISRDNSKNTLYLQMNSLRAEDTAVY |
| | | molecule | YCARRAGIIGTIGYYYGMDVWGQGTTVTVSSGGGGSGGGGSGGGGSS |
| | | | YELTQPPSVSVSPGQTASITCSGDRLGEKYTSWYQQRPGQSPLLVIY |
| | | | QDTKRPSGIPERFSGSNSGNTATLTISGTQAMDEADYYCQAWESSTV |
| | | | VFGCGTKLTVLSGGGGSEVQLVESGGGLVQPGGSLKLSCAASGFTFN |
| | | | KYAMNWVRQAPGKGLEWVARIRSKYNNYATYYADSVKDRFTISRDDS |
| | | | KNTAYLQMNNLKTEDTAVYYCVRHGNFGNSYISYWAYWGQGTLVTVS |
| | | | SGGGGSGGGGSGGGGSQTVVTQEPSLTVSPGGTVTLTCGSSTGAVTS |
| | | | GNYPNWVQQKPGQAPRGLIGGTKFLAPGTPARFSGSLLGGKAALTLS |
| | | | GVQPEDEAEYYCVLWYSNRWVFGGGTKLTVLGGGGDKTHTCPPCPAP |
| | | | ELLGGPSVFLFPPKPKDTLMISRTPEVTCVVVDVSHEDPEVKFNWYV |
| | | | DGVEVHNAKTKPCEEQYGSTYRCVSVLTVLHQDWLNGKEYKCKVSNK |
| | | | ALPAPIEKTISKAKGQPREPQVYTLPPSREEMTKNQVSLTCLVKGFY |
| | | | PSDIAVEWESNGQPENNYKTTPPVLDSDGSFFLYSKLTVDKSRWQQG |
| | | | NVFSCSVMHEALHNHYTQKSLSLSPGGGGSGGGGSGGGGSGGGGSGG |
| | | | GGSGGGGSDKTHTCPPCPAPELLGGPSVFLFPPKPKDTLMISRTPEV |
| | | | TCVVVDVSHEDPEVKFNWYVDGVEVHNAKTKPCEEQYGSTYRCVSVL |
| | | | TVLHQDWLNGKEYKCKVSNKALPAPIEKTISKAKGQPREPQVYTLPP |
| | | | SREEMTKNQVSLTCLVKGFYPSDIAVEWESNGQPENNYKTTPPVLDS |
| | | | DGSFFLYSKLTVDKSRWQQGNVFSCSVMHEALHNHYTQKSLSLSPGK |
| 152. | CH_2xCD3- | VH CDR1 | SYGMH |
| | scFc | | |
| 153. | CH_2xCD3- | VH CDR2 | FIWYDGSNKYYADSVKG |
| | scFc | | |
| 154. | CH_2xCD3- | VH CDR3 | RAGIIGTIGYYYGMDV |
| | scFc | | |
| 155. | CH_2xCD3- | VL CDR1 | SGDRLGEKYTS |
| | scFc | | |
| 156. | CH_2xCD3- | VL CDR2 | QDTKRPS |
| | scFc | | |
| 157. | CH_2xCD3- | VL CDR3 | QAWESSTVV |
| | scFc | | |
| 158. | CH_2xCD3- | VH | QVQLVESGGGVVQPGGSLRLSCAASGFTFSSYGMHWVRQAPGKGLEW |
| | scFc | | VAFIWYDGSNKYYADSVKGRFTISRDNSKNTLYLQMNSLRAEDTAVY |
| | | | YCARRAGIIGTIGYYYGMDVWGQGTTVTVSS |
| 159. | CH_2xCD3- | VL | SYELTQPPSVSVSPGQTASITCSGDRLGEKYTSWYQQRPGQSPLLVI |
| | scFc | | YQDTKRPSGIPERFSGSNSGNTATLTISGTQAMDEADYYCQAWESST |
| | | | VVFGGGTKLTVL |
| 160. | CH_2xCD3- | scFv | QVQLVESGGGVVQPGGSLRLSCAASGFTFSSYGMHWVRQAPGKGLEW |
| | scFc | | VAFIWYDGSNKYYADSVKGRFTISRDNSKNTLYLQMNSLRAEDTAVY |
| | | | YCARRAGIIGTIGYYYGMDVWGQGTTVTVSSGGGGSGGGGSGGGGSS |
| | | | YELTQPPSVSVSPGQTASITCSGDRLGEKYTSWYQQRPGQSPLLVIY |
| | | | QDTKRPSGIPERFSGSNSGNTATLTISGTQAMDEADYYCQAWESSTV |
| | | | VFGGGTKLTVL |
| 161. | CH_2xCD3- | Bispecific | QVQLVESGGGVVQPGGSLRLSCAASGFTFSSYGMHWVRQAPGKGLEW |
| | scFc | molecule | VAFIWYDGSNKYYADSVKGRFTISRDNSKNTLYLQMNSLRAEDTAVY |
| | | | YCARRAGIIGTIGYYYGMDVWGQGTTVTVSSGGGGSGGGGSGGGGSS |
| | | | YELTQPPSVSVSPGQTASITCSGDRLGEKYTSWYQQRPGQSPLLVIY |
| | | | QDTKRPSGIPERFSGSNSGNTATLTISGTQAMDEADYYCQAWESSTV |
| | | | VFGGGTKLTVLSGGGGSEVQLVESGGGLVQPGGSLKLSCAASGFTFN |
| | | | KYAMNWVRQAPGKGLEWVARIRSKYNNYATYYADSVKDRFTISRDDS |
| | | | KNTAYLQMNNLKTEDTAVYYCVRHGNFGNSYISYWAYWGQGTLVTVS |
| | | | SGGGGSGGGGSGGGGSQTVVTQEPSLTVSPGGTVTLTCGSSTGAVTS |
| | | | GNYPNWVQQKPGQAPRGLIGGTKFLAPGTPARFSGSLLGGKAALTLS |
| | | | GVQPEDEAEYYCVLWYSNRWVFGGGTKLTVL |
| 162. | CH_2xCD3- | Bispecific | QVQLVESGGGVVQPGGSLRLSCAASGFTFSSYGMHWVRQAPGKGLEW |
| | scFc | HLE | VAFIWYDGSNKYYADSVKGRFTISRDNSKNTLYLQMNSLRAEDTAVY |
| | | molecule | YCARRAGIIGTIGYYYGMDVWGQGTTVTVSSGGGGSGGGGSGGGGSS |
| | | | YELTQPPSVSVSPGQTASITCSGDRLGEKYTSWYQQRPGQSPLLVIY |
| | | | QDTKRPSGIPERFSGSNSGNTATLTISGTQAMDEADYYCQAWESSTV |
| | | | VFGGGTKLTVLSGGGGSEVQLVESGGGLVQPGGSLKLSCAASGFTFN |
| | | | KYAMNWVRQAPGKGLEWVARIRSKYNNYATYYADSVKDRFTISRDDS |
| | | | KNTAYLQMNNLKTEDTAVYYCVRHGNFGNSYISYWAYWGQGTLVTVS |
| | | | SGGGGSGGGGSGGGGSQTVVTQEPSLTVSPGGTVTLTCGSSTGAVTS |
| | | | GNYPNWVQQKPGQAPRGLIGGTKFLAPGTPARFSGSLLGGKAALTLS |
| | | | GVQPEDEAEYYCVLWYSNRWVFGGGTKLTVLGGGGDKTHTCPPCPAP |
| | | | ELLGGPSVFLFPPKPKDTLMISRTPEVTCVVVDVSHEDPEVKFNWYV |
| | | | DGVEVHNAKTKPCEEQYGSTYRCVSVLTVLHQDWLNGKEYKCKVSNK |
| | | | ALPAPIEKTISKAKGQPREPQVYTLPPSREEMTKNQVSLTCLVKGFY |
| | | | PSDIAVEWESNGQPENNYKTTPPVLDSDGSFFLYSKLTVDKSRWQQG |
| | | | NVFSCSVMHEALHNHYTQKSLSLSPGKGGGGSGGGGSGGGGSGGGGS |
| | | | GGGGSGGGGSDKTHTCPPCPAPELLGGPSVFLFPPKPKDTLMISRTP |
| | | | EVTCVVVDVSHEDPEVKFNWYVDGVEVHNAKTKPCEEQYGSTYRCVS |
| | | | VLTVLHQDWLNGKEYKCKVSNKALPAPIEKTISKAKGQPREPQVYTL |
| | | | PPSREEMTKNQVSLTCLVKGFYPSDIAVEWESNGQPENNYKTTPPVL |
| | | | DSDGSFFLYSKLTVDKSRWQQGNVFSCSVMHEALHNHYTQKSLSLSP |
| | | | GK |
| 163. | CH_2xCD3- | Bispecific | QVQLVESGGGVVQPGGSLRLSCAASGFTFSSYGMHWVRQAPGKGLEW |
| | scFc_delGK | HLE | VAFIWYDGSNKYYADSVKGRFTISRDNSKNTLYLQMNSLRAEDTAVY |
| | | molecule | YCARRAGIIGTIGYYYGMDVWGQGTTVTVSSGGGGSGGGGSGGGGSS |
| | | | YELTQPPSVSVSPGQTASITCSGDRLGEKYTSWYQQRPGQSPLLVIY |
| | | | QDTKRPSGIPERFSGSNSGNTATLTISGTQAMDEADYYCQAWESSTV |
| | | | VFGGGTKLTVLSGGGGSEVQLVESGGGLVQPGGSLKLSCAASGFTFN |
| | | | KYAMNWVRQAPGKGLEWVARIRSKYNNYATYYADSVKDRFTISRDDS |
| | | | KNTAYLQMNNLKTEDTAVYYCVRHGNFGNSYISYWAYWGQGTLVTVS |
| | | | SGGGGSGGGGSGGGGSQTVVTQEPSLTVSPGGTVTLTCGSSTGAVTS |
| | | | GNYPNWVQQKPGQAPRGLIGGTKFLAPGTPARFSGSLLGGKAALTLS |
| | | | GVQPEDEAEYYCVLWYSNRWVFGGGTKLTVLGGGGDKTHTCPPCPAP |
| | | | ELLGGPSVFLFPPKPKDTLMISRTPEVTCVVVDVSHEDPEVKFNWYV |
| | | | DGVEVHNAKTKPCEEQYGSTYRCVSVLTVLHQDWLNGKEYKCKVSNK |
| | | | ALPAPIEKTISKAKGQPREPQVYTLPPSREEMTKNQVSLTCLVKGFY |
| | | | PSDIAVEWESNGQPENNYKTTPPVLDSDGSFFLYSKLTVDKSRWQQG |
| | | | NVFSCSVMHEALHNHYTQKSLSLSPGGGGSGGGGSGGGGSGGGGSGG |
| | | | GGSGGGGSDKTHTCPPCPAPELLGGPSVFLFPPKPKDTLMISRTPEV |
| | | | TCVVVDVSHEDPEVKFNWYVDGVEVHNAKTKPCEEQYGSTYRCVSVL |
| | | | TVLHQDWLNGKEYKCKVSNKALPAPIEKTISKAKGQPREPQVYTLPP |
| | | | SREEMTKNQVSLTCLVKGFYPSDIAVEWESNGQPENNYKTTPPVLDS |
| | | | DGSFFLYSKLTVDKSRWQQGNVFSCSVMHEALHNHYTQKSLSLSPGK |
| 164. | CH_2_CCxCD | VH | QVQLVESGGGVVQPGGSLRLSCAASGFTFSSYGMHWVRQAPGKCLEW |
| | 3-scFc | | VAFIWYDGSNKYYADSVKGRFTISRDNSKNTLYLQMNSLRAEDTAVY |
| | | | YCARRAGIIGTIGYYYGMDVWGQGTTVTVSS |
| 165. | CH_2_CCxCD | VL | SYELTQPPSVSVSPGQTASITCSGDRLGEKYTSWYQQRPGQSPLLVI |
| | 3-scFc | | YQDTKRPSGIPERFSGSNSGNTATLTISGTQAMDEADYYCQAWESST |
| | | | VVFGCGTKLTVL |
| 166. | CH_2_CCxCD | scFv | QVQLVESGGGVVQPGGSLRLSCAASGFTFSSYGMHWVRQAPGKCLEW |
| | 3-scFc | | VAFIWYDGSNKYYADSVKGRFTISRDNSKNTLYLQMNSLRAEDTAVY |
| | | | YCARRAGIIGTIGYYYGMDVWGQGTTVTVSSGGGGSGGGGSGGGGSS |
| | | | YELTQPPSVSVSPGQTASITCSGDRLGEKYTSWYQQRPGQSPLLVIY |
| | | | QDTKRPSGIPERFSGSNSGNTATLTISGTQAMDEADYYCQAWESSTV |
| | | | VFGCGTKLTVL |
| 167. | CH_2_CCxCD | bispecific | QVQLVESGGGVVQPGGSLRLSCAASGFTFSSYGMHWVRQAPGKCLEW |
| | 3-scFc | molecule | VAFIWYDGSNKYYADSVKGRFTISRDNSKNTLYLQMNSLRAEDTAVY |
| | | | YCARRAGIIGTIGYYYGMDVWGQGTTVTVSSGGGGSGGGGSGGGGSS |
| | | | YELTQPPSVSVSPGQTASITCSGDRLGEKYTSWYQQRPGQSPLLVIY |
| | | | QDTKRPSGIPERFSGSNSGNTATLTISGTQAMDEADYYCQAWESSTV |
| | | | VFGCGTKLTVLSGGGGSEVQLVESGGGLVQPGGSLKLSCAASGFTFN |
| | | | KYAMNWVRQAPGKGLEWVARIRSKYNNYATYYADSVKDRFTISRDDS |
| | | | KNTAYLQMNNLKTEDTAVYYCVRHGNFGNSYISYWAYWGQGTLVTVS |
| | | | SGGGGSGGGGSGGGGSQTVVTQEPSLTVSPGGTVTLTCGSSTGAVTS |
| | | | GNYPNWVQQKPGQAPRGLIGGTKFLAPGTPARFSGSLLGGKAALTLS |
| | | | GVQPEDEAEYYCVLWYSNRWVFGGGTKLTVL |
| 168. | CH_2_CCxCD | bispecific | QVQLVESGGGVVQPGGSLRLSCAASGFTFSSYGMHWVRQAPGKCLEW |
| | 3-scFc | molecule | VAFIWYDGSNKYYADSVKGRFTISRDNSKNTLYLQMNSLRAEDTAVY |
| | | | YCARRAGIIGTIGYYYGMDVWGQGTTVTVSSGGGGSGGGGSGGGGSS |
| | | | YELTQPPSVSVSPGQTASITCSGDRLGEKYTSWYQQRPGQSPLLVIY |
| | | | QDTKRPSGIPERFSGSNSGNTATLTISGTQAMDEADYYCQAWESSTV |
| | | | VFGCGTKLTVLSGGGGSEVQLVESGGGLVQPGGSLKLSCAASGFTFN |
| | | | KYAMNWVRQAPGKGLEWVARIRSKYNNYATYYADSVKDRFTISRDDS |
| | | | KNTAYLQMNNLKTEDTAVYYCVRHGNFGNSYISYWAYWGQGTLVTVS |
| | | | SGGGGSGGGGSGGGGSQTVVTQEPSLTVSPGGTVTLTCGSSTGAVTS |
| | | | GNYPNWVQQKPGQAPRGLIGGTKFLAPGTPARFSGSLLGGKAALTLS |
| | | | GVQPEDEAEYYCVLWYSNRWVFGGGTKLTVLGGGGDKTHTCPPCPAP |
| | | | ELLGGPSVFLFPPKPKDTLMISRTPEVTCVVVDVSHEDPEVKFNWYV |
| | | | DGVEVHNAKTKPCEEQYGSTYRCVSVLTVLHQDWLNGKEYKCKVSNK |
| | | | ALPAPIEKTISKAKGQPREPQVYTLPPSREEMTKNQVSLTCLVKGFY |
| | | | PSDIAVEWESNGQPENNYKTTPPVLDSDGSFFLYSKLTVDKSRWQQG |
| | | | NVFSCSVMHEALHNHYTQKSLSLSPGKGGGGSGGGGSGGGGSGGGGS |
| | | | GGGGSGGGGSDKTHTCPPCPAPELLGGPSVFLFPPKPKDTLMISRTP |
| | | | EVTCVVVDVSHEDPEVKFNWYVDGVEVHNAKTKPCEEQYGSTYRCVS |
| | | | VLTVLHQDWLNGKEYKCKVSNKALPAPIEKTISKAKGQPREPQVYTL |
| | | | PPSREEMTKNQVSLTCLVKGFYPSDIAVEWESNGQPENNYKTTPPVL |
| | | | DSDGSFFLYSKLTVDKSRWQQGNVFSCSVMHEALHNHYTQKSLSLSP |
| | | | GK |
| 169. | CH_2_ | bispecific | QVQLVESGGGVVQPGGSLRLSCAASGFTFSSYGMHWVRQAPGKCLEW |
| | CCxCD3- | molecule | VAFIWYDGSNKYYADSVKGRFTISRDNSKNTLYLQMNSLRAEDTAVY |
| | scFc_delGK | | YCARRAGIIGTIGYYYGMDVWGQGTTVTVSSGGGGSGGGGSGGGGSS |
| | | | YELTQPPSVSVSPGQTASITCSGDRLGEKYTSWYQQRPGQSPLLVIY |
| | | | QDTKRPSGIPERFSGSNSGNTATLTISGTQAMDEADYYCQAWESSTV |
| | | | VFGCGTKLTVLSGGGGSEVQLVESGGGLVQPGGSLKLSCAASGFTFN |
| | | | KYAMNWVRQAPGKGLEWVARIRSKYNNYATYYADSVKDRFTISRDDS |
| | | | KNTAYLQMNNLKTEDTAVYYCVRHGNFGNSYISYWAYWGQGTLVTVS |
| | | | SGGGGSGGGGSGGGGSQTVVTQEPSLTVSPGGTVTLTCGSSTGAVTS |
| | | | GNYPNWVQQKPGQAPRGLIGGTKFLAPGTPARFSGSLLGGKAALTLS |
| | | | GVQPEDEAEYYCVLWYSNRWVFGGGTKLTVLGGGGDKTHTCPPCPAP |
| | | | ELLGGPSVFLFPPKPKDTLMISRTPEVTCVVVDVSHEDPEVKFNWYV |
| | | | DGVEVHNAKTKPCEEQYGSTYRCVSVLTVLHQDWLNGKEYKCKVSNK |
| | | | ALPAPIEKTISKAKGQPREPQVYTLPPSREEMTKNQVSLTCLVKGFY |
| | | | PSDIAVEWESNGQPENNYKTTPPVLDSDGSFFLYSKLTVDKSRWQQG |
| | | | NVFSCSVMHEALHNHYTQKSLSLSPGGGGSGGGGSGGGGSGGGGSGG |
| | | | GGSGGGGSDKTHTCPPCPAPELLGGPSVFLFPPKPKDTLMISRTPEV |
| | | | TCVVVDVSHEDPEVKFNWYVDGVEVHNAKTKPCEEQYGSTYRCVSVL |
| | | | TVLHQDWLNGKEYKCKVSNKALPAPIEKTISKAKGQPREPQVYTLPP |
| | | | SREEMTKNQVSLTCLVKGFYPSDIAVEWESNGQPENNYKTTPPVLDS |
| | | | DGSFFLYSKLTVDKSRWQQGNVFSCSVMHEALHNHYTQKSLSLSPGK |
| 170. | CH_3xCD3- | VH CDR1 | SYGMH |
| | scFc | | |
| 171. | CH_3xCD3- | VH CDR2 | FIWYEGSNKYYAESVKD |
| | scFc | | |
| 172. | CH_3xCD3- | VH CDR3 | RAGIIGTIGYYYGMDV |
| | scFc | | |
| 173. | CH_3xCD3- | VL CDR1 | SGDRLGEKYTS |
| | scFc | | |
| 174. | CH_3xCD3- | VL CDR2 | QDTKRPS |
| | scFc | | |
| 175. | CH_3xCD3- | VL CDR3 | QAWESSTVV |
| | scFc | | |
| 176. | CH_3xCD3- | VH | QVQLVESGGGVVQPGGSLRLSCAASGFTFSSYGMHWVRQAPGKGLEW |
| | scFc | | VAFIWYEGSNKYYAESVKDRFTISRDNSKNTLYLQMNSLRAEDTAVY |
| | | | YCARRAGIIGTIGYYYGMDVWGQGTTVTVSS |
| 177. | CH_3xCD3- | VL | SYELTQPPSVSVSPGQTASITCSGDRLGEKYTSWYQQRPGQSPLLVI |
| | scFc | | YQDTKRPSGIPERFSGSNSGNTATLTISGTQAMDEADYYCQAWESST |
| | | | VVFGGGTKLTVL |
| 178. | CH_3xCD3- | scFv | QVQLVESGGGVVQPGGSLRLSCAASGFTFSSYGMHWVRQAPGKGLEW |
| | scFc | | VAFIWYEGSNKYYAESVKDRFTISRDNSKNTLYLQMNSLRAEDTAVY |
| | | | YCARRAGIIGTIGYYYGMDVWGQGTTVTVSSGGGGSGGGGSGGGGSS |
| | | | YELTQPPSVSVSPGQTASITCSGDRLGEKYTSWYQQRPGQSPLLVIY |
| | | | QDTKRPSGIPERFSGSNSGNTATLTISGTQAMDEADYYCQAWESSTV |
| | | | VFGGGTKLTVL |
| 179. | CH_3xCD3- | Bispecific | QVQLVESGGGVVQPGGSLRLSCAASGFTFSSYGMHWVRQAPGKGLEW |
| | scFc | molecule | VAFIWYEGSNKYYAESVKDRFTISRDNSKNTLYLQMNSLRAEDTAVY |
| | | | YCARRAGIIGTIGYYYGMDVWGQGTTVTVSSGGGGSGGGGSGGGGSS |
| | | | YELTQPPSVSVSPGQTASITCSGDRLGEKYTSWYQQRPGQSPLLVIY |
| | | | QDTKRPSGIPERFSGSNSGNTATLTISGTQAMDEADYYCQAWESSTV |
| | | | VFGGGTKLTVLSGGGGSEVQLVESGGGLVQPGGSLKLSCAASGFTFN |
| | | | KYAMNWVRQAPGKGLEWVARIRSKYNNYATYYADSVKDRFTISRDDS |
| | | | KNTAYLQMNNLKTEDTAVYYCVRHGNFGNSYISYWAYWGQGTLVTVS |
| | | | SGGGGSGGGGSGGGGSQTVVTQEPSLTVSPGGTVTLTCGSSTGAVTS |
| | | | GNYPNWVQQKPGQAPRGLIGGTKFLAPGTPARFSGSLLGGKAALTLS |
| | | | GVQPEDEAEYYCVLWYSNRWVFGGGTKLTVL |
| 180. | CH_3xCD3- | Bispecific | QVQLVESGGGVVQPGGSLRLSCAASGFTFSSYGMHWVRQAPGKGLEW |
| | scFc | HLE | VAFIWYEGSNKYYAESVKDRFTISRDNSKNTLYLQMNSLRAEDTAVY |
| | | molecule | YCARRAGIIGTIGYYYGMDVWGQGTTVTVSSGGGGSGGGGSGGGGSS |
| | | | YELTQPPSVSVSPGQTASITCSGDRLGEKYTSWYQQRPGQSPLLVIY |
| | | | QDTKRPSGIPERFSGSNSGNTATLTISGTQAMDEADYYCQAWESSTV |
| | | | VFGGGTKLTVLSGGGGSEVQLVESGGGLVQPGGSLKLSCAASGFTFN |
| | | | KYAMNWVRQAPGKGLEWVARIRSKYNNYATYYADSVKDRFTISRDDS |
| | | | KNTAYLQMNNLKTEDTAVYYCVRHGNFGNSYISYWAYWGQGTLVTVS |
| | | | SGGGGSGGGGSGGGGSQTVVTQEPSLTVSPGGTVTLTCGSSTGAVTS |
| | | | GNYPNWVQQKPGQAPRGLIGGTKFLAPGTPARFSGSLLGGKAALTLS |
| | | | GVQPEDEAEYYCVLWYSNRWVFGGGTKLTVLGGGGDKTHTCPPCPAP |
| | | | ELLGGPSVFLFPPKPKDTLMISRTPEVTCVVVDVSHEDPEVKFNWYV |
| | | | DGVEVHNAKTKPCEEQYGSTYRCVSVLTVLHQDWLNGKEYKCKVSNK |
| | | | ALPAPIEKTISKAKGQPREPQVYTLPPSREEMTKNQVSLTCLVKGFY |
| | | | PSDIAVEWESNGQPENNYKTTPPVLDSDGSFFLYSKLTVDKSRWQQG |
| | | | NVFSCSVMHEALHNHYTQKSLSLSPGKGGGGSGGGGSGGGGSGGGGS |
| | | | GGGGSGGGGSDKTHTCPPCPAPELLGGPSVFLFPPKPKDTLMISRTP |
| | | | EVTCVVVDVSHEDPEVKFNWYVDGVEVHNAKTKPCEEQYGSTYRCVS |
| | | | VLTVLHQDWLNGKEYKCKVSNKALPAPIEKTISKAKGQPREPQVYTL |
| | | | PPSREEMTKNQVSLTCLVKGFYPSDIAVEWESNGQPENNYKTTPPVL |
| | | | DSDGSFFLYSKLTVDKSRWQQGNVFSCSVMHEALHNHYTQKSLSLSP |
| | | | GK |
| 181. | CH_3xCD3- | Bispecific | QVQLVESGGGVVQPGGSLRLSCAASGFTFSSYGMHWVRQAPGKGLEW |
| | scFc_delGK | HLE | VAFIWYEGSNKYYAESVKDRFTISRDNSKNTLYLQMNSLRAEDTAVY |
| | | molecule | YCARRAGIIGTIGYYYGMDVWGQGTTVTVSSGGGGSGGGGSGGGGSS |
| | | | YELTQPPSVSVSPGQTASITCSGDRLGEKYTSWYQQRPGQSPLLVIY |
| | | | QDTKRPSGIPERFSGSNSGNTATLTISGTQAMDEADYYCQAWESSTV |
| | | | VFGGGTKLTVLSGGGGSEVQLVESGGGLVQPGGSLKLSCAASGFTFN |
| | | | KYAMNWVRQAPGKGLEWVARIRSKYNNYATYYADSVKDRFTISRDDS |
| | | | KNTAYLQMNNLKTEDTAVYYCVRHGNFGNSYISYWAYWGQGTLVTVS |
| | | | SGGGGSGGGGSGGGGSQTVVTQEPSLTVSPGGTVTLTCGSSTGAVTS |
| | | | GNYPNWVQQKPGQAPRGLIGGTKFLAPGTPARFSGSLLGGKAALTLS |
| | | | GVQPEDEAEYYCVLWYSNRWVFGGGTKLTVLGGGGDKTHTCPPCPAP |
| | | | ELLGGPSVFLFPPKPKDTLMISRTPEVTCVVVDVSHEDPEVKFNWYV |
| | | | DGVEVHNAKTKPCEEQYGSTYRCVSVLTVLHQDWLNGKEYKCKVSNK |
| | | | ALPAPIEKTISKAKGQPREPQVYTLPPSREEMTKNQVSLTCLVKGFY |
| | | | PSDIAVEWESNGQPENNYKTTPPVLDSDGSFFLYSKLTVDKSRWQQG |
| | | | NVFSCSVMHEALHNHYTQKSLSLSPGGGGSGGGGSGGGGSGGGGSGG |
| | | | GGSGGGGSDKTHTCPPCPAPELLGGPSVFLFPPKPKDTLMISRTPEV |
| | | | TCVVVDVSHEDPEVKFNWYVDGVEVHNAKTKPCEEQYGSTYRCVSVL |
| | | | TVLHQDWLNGKEYKCKVSNKALPAPIEKTISKAKGQPREPQVYTLPP |
| | | | SREEMTKNQVSLTCLVKGFYPSDIAVEWESNGQPENNYKTTPPVLDS |
| | | | DGSFFLYSKLTVDKSRWQQGNVFSCSVMHEALHNHYTQKSLSLSPGK |
| 182. | CH_3_CCxCD | VH | QVQLVESGGGVVQPGGSLRLSCAASGFTFSSYGMHWVRQAPGKCLEW |
| | 3-scFc | | VAFIWYEGSNKYYAESVKDRFTISRDNSKNTLYLQMNSLRAEDTAVY |
| | | | YCARRAGIIGTIGYYYGMDVWGQGTTVTVSS |
| 183. | CH_3_CCxCD | VL | SYELTQPPSVSVSPGQTASITCSGDRLGEKYTSWYQQRPGQSPLLVI |
| | 3-scFc | | YQDTKRPSGIPERFSGSNSGNTATLTISGTQAMDEADYYCQAWESST |
| | | | VVFGCGTKLTVL |
| 184. | CH_3_CCxCD | scFv | QVQLVESGGGVVQPGGSLRLSCAASGFTFSSYGMHWVRQAPGKCLEW |
| | 3-scFc | | VAFIWYEGSNKYYAESVKDRFTISRDNSKNTLYLQMNSLRAEDTAVY |
| | | | YCARRAGIIGTIGYYYGMDVWGQGTTVTVSSGGGGSGGGGSGGGGSS |
| | | | YELTQPPSVSVSPGQTASITCSGDRLGEKYTSWYQQRPGQSPLLVIY |
| | | | QDTKRPSGIPERFSGSNSGNTATLTISGTQAMDEADYYCQAWESSTV |
| | | | VFGCGTKLTVL |
| 185. | CH_3_CCxCD | Bispecific | QVQLVESGGGVVQPGGSLRLSCAASGFTFSSYGMHWVRQAPGKCLEW |
| | 3-scFc | molecule | VAFIWYEGSNKYYAESVKDRFTISRDNSKNTLYLQMNSLRAEDTAVY |
| | | | YCARRAGIIGTIGYYYGMDVWGQGTTVTVSSGGGGSGGGGSGGGGSS |
| | | | YELTQPPSVSVSPGQTASITCSGDRLGEKYTSWYQQRPGQSPLLVIY |
| | | | QDTKRPSGIPERFSGSNSGNTATLTISGTQAMDEADYYCQAWESSTV |
| | | | VFGCGTKLTVLSGGGGSEVQLVESGGGLVQPGGSLKLSCAASGFTFN |
| | | | KYAMNWVRQAPGKGLEWVARIRSKYNNYATYYADSVKDRFTISRDDS |
| | | | KNTAYLQMNNLKTEDTAVYYCVRHGNFGNSYISYWAYWGQGTLVTVS |
| | | | SGGGGSGGGGSGGGGSQTVVTQEPSLTVSPGGTVTLTCGSSTGAVTS |
| | | | GNYPNWVQQKPGQAPRGLIGGTKFLAPGTPARFSGSLLGGKAALTLS |
| | | | GVQPEDEAEYYCVLWYSNRWVFGGGTKLTVL |
| 186. | CH_3_CCxCD | Bispecific | QVQLVESGGGVVQPGGSLRLSCAASGFTFSSYGMHWVRQAPGKCLEW |
| | 3-scFc | HLE | VAFIWYEGSNKYYAESVKDRFTISRDNSKNTLYLQMNSLRAEDTAVY |
| | | molecule | YCARRAGIIGTIGYYYGMDVWGQGTTVTVSSGGGGSGGGGSGGGGSS |
| | | | YELTQPPSVSVSPGQTASITCSGDRLGEKYTSWYQQRPGQSPLLVIY |
| | | | QDTKRPSGIPERFSGSNSGNTATLTISGTQAMDEADYYCQAWESSTV |
| | | | VFGCGTKLTVLSGGGGSEVQLVESGGGLVQPGGSLKLSCAASGFTFN |
| | | | KYAMNWVRQAPGKGLEWVARIRSKYNNYATYYADSVKDRFTISRDDS |
| | | | KNTAYLQMNNLKTEDTAVYYCVRHGNFGNSYISYWAYWGQGTLVTVS |
| | | | SGGGGSGGGGSGGGGSQTVVTQEPSLTVSPGGTVTLTCGSSTGAVTS |
| | | | GNYPNWVQQKPGQAPRGLIGGTKFLAPGTPARFSGSLLGGKAALTLS |
| | | | GVQPEDEAEYYCVLWYSNRWVFGGGTKLTVLGGGGDKTHTCPPCPAP |
| | | | ELLGGPSVFLFPPKPKDTLMISRTPEVTCVVVDVSHEDPEVKFNWYV |
| | | | DGVEVHNAKTKPCEEQYGSTYRCVSVLTVLHQDWLNGKEYKCKVSNK |
| | | | ALPAPIEKTISKAKGQPREPQVYTLPPSREEMTKNQVSLTCLVKGFY |
| | | | PSDIAVEWESNGQPENNYKTTPPVLDSDGSFFLYSKLTVDKSRWQQG |
| | | | NVFSCSVMHEALHNHYTQKSLSLSPGKGGGGSGGGGSGGGGSGGGGS |
| | | | GGGGSGGGGSDKTHTCPPCPAPELLGGPSVFLFPPKPKDTLMISRTP |
| | | | EVTCVVVDVSHEDPEVKFNWYVDGVEVHNAKTKPCEEQYGSTYRCVS |
| | | | VLTVLHQDWLNGKEYKCKVSNKALPAPIEKTISKAKGQPREPQVYTL |
| | | | PPSREEMTKNQVSLTCLVKGFYPSDIAVEWESNGQPENNYKTTPPVL |
| | | | DSDGSFFLYSKLTVDKSRWQQGNVFSCSVMHEALHNHYTQKSLSLSP |
| | | | GK |
| 187. | CH_3_ | Bispecific | QVQLVESGGGVVQPGGSLRLSCAASGFTFSSYGMHWVRQAPGKCLEW |
| | CCxCD3- | HLE | VAFIWYEGSNKYYAESVKDRFTISRDNSKNTLYLQMNSLRAEDTAVY |
| | scFc_delGK | molecule | YCARRAGIIGTIGYYYGMDVWGQGTTVTVSSGGGGSGGGGSGGGGSS |
| | | | YELTQPPSVSVSPGQTASITCSGDRLGEKYTSWYQQRPGQSPLLVIY |
| | | | QDTKRPSGIPERFSGSNSGNTATLTISGTQAMDEADYYCQAWESSTV |
| | | | VFGCGTKLTVLSGGGGSEVQLVESGGGLVQPGGSLKLSCAASGFTFN |
| | | | KYAMNWVRQAPGKGLEWVARIRSKYNNYATYYADSVKDRFTISRDDS |
| | | | KNTAYLQMNNLKTEDTAVYYCVRHGNFGNSYISYWAYWGQGTLVTVS |
| | | | SGGGGSGGGGSGGGGSQTVVTQEPSLTVSPGGTVTLTCGSSTGAVTS |
| | | | GNYPNWVQQKPGQAPRGLIGGTKFLAPGTPARFSGSLLGGKAALTLS |
| | | | GVQPEDEAEYYCVLWYSNRWVFGGGTKLTVLGGGGDKTHTCPPCPAP |
| | | | ELLGGPSVFLFPPKPKDTLMISRTPEVTCVVVDVSHEDPEVKFNWYV |
| | | | DGVEVHNAKTKPCEEQYGSTYRCVSVLTVLHQDWLNGKEYKCKVSNK |
| | | | ALPAPIEKTISKAKGQPREPQVYTLPPSREEMTKNQVSLTCLVKGFY |
| | | | PSDIAVEWESNGQPENNYKTTPPVLDSDGSFFLYSKLTVDKSRWQQG |
| | | | NVFSCSVMHEALHNHYTQKSLSLSPGGGGSGGGGSGGGGSGGGGSGG |
| | | | GGSGGGGSDKTHTCPPCPAPELLGGPSVFLFPPKPKDTLMISRTPEV |
| | | | TCVVVDVSHEDPEVKFNWYVDGVEVHNAKTKPCEEQYGSTYRCVSVL |
| | | | TVLHQDWLNGKEYKCKVSNKALPAPIEKTISKAKGQPREPQVYTLPP |
| | | | SREEMTKNQVSLTCLVKGFYPSDIAVEWESNGQPENNYKTTPPVLDS |
| | | | DGSFFLYSKLTVDKSRWQQGNVFSCSVMHEALHNHYTQKSLSLSPGK |
| 188. | DL_1xCD3- | VH CDR1 | SYYWS |
| | scFc | | |
| 189. | DL_1xCD3- | VH CDR2 | YVYYSGTTNYNPSLKS |
| | scFc | | |
| 190. | DL_1xCD3- | VH CDR3 | IAVTGFYFDY |
| | scFc | | |
| 191. | DL_1xCD3- | VL CDR1 | RASQRVNNNYLA |
| | scFc | | |
| 192. | DL_1xCD3- | VL CDR2 | GASSRAT |
| | scFc | | |
| 193. | DL_1xCD3- | VL CDR3 | QQYDRSPLT |
| | scFc | | |
| 194. | DL_1xCD3- | VH | QVQLQESGPGLVKPSETLSLTCTVSGGSISSYYWSWIRQPPGKGLEW |
| | scFc | | IGYVYYSGTTNYNPSLKSRVTISVDTSKNQFSLKLSSVTAADTAVYY |
| | | | CASIAVTGFYFDYWGQGTLVTVSS |
| 195. | DL_1xCD3- | VL | EIVLTQSPGTLSLSPGERVTLSCRASQRVNNNYLAWYQQRPGQAPRL |
| | scFc | | LIYGASSRATGIPDRFSGSGSGTDFTLTISRLEPEDFAVYYCQQYDR |
| | | | SPLTFGGGTKLEIK |
| 196. | DL_1xCD3- | scFv | QVQLQESGPGLVKPSETLSLTCTVSGGSISSYYWSWIRQPPGKGLEW |
| | scFc | | IGYVYYSGTTNYNPSLKSRVTISVDTSKNQFSLKLSSVTAADTAVYY |
| | | | CASIAVTGFYFDYWGQGTLVTVSSGGGGSGGGGSGGGGSEIVLTQSP |
| | | | GTLSLSPGERVTLSCRASQRVNNNYLAWYQQRPGQAPRLLIYGASSR |
| | | | ATGIPDRFSGSGSGTDFTLTISRLEPEDFAVYYCQQYDRSPLTFGGG |
| | | | TKLEIK |
| 197. | DL_1xCD3- | Bispecific | QVQLQESGPGLVKPSETLSLTCTVSGGSISSYYWSWIRQPPGKGLEW |
| | scFc | molecule | IGYVYYSGTTNYNPSLKSRVTISVDTSKNQFSLKLSSVTAADTAVYY |
| | | | CASIAVTGFYFDYWGQGTLVTVSSGGGGSGGGGSGGGGSEIVLTQSP |
| | | | GTLSLSPGERVTLSCRASQRVNNNYLAWYQQRPGQAPRLLIYGASSR |
| | | | ATGIPDRFSGSGSGTDFTLTISRLEPEDFAVYYCQQYDRSPLTFGGG |
| | | | TKLEIKSGGGGSEVQLVESGGGLVQPGGSLKLSCAASGFTFNKYAMN |
| | | | WVRQAPGKGLEWVARIRSKYNNYATYYADSVKDRFTISRDDSKNTAY |
| | | | LQMNNLKTEDTAVYYCVRHGNFGNSYISYWAYWGQGTLVTVSSGGGG |
| | | | SGGGGSGGGGSQTVVTQEPSLTVSPGGTVTLTCGSSTGAVTSGNYPN |
| | | | WVQQKPGQAPRGLIGGTKFLAPGTPARFSGSLLGGKAALTLSGVQPE |
| | | | DEAEYYCVLWYSNRWVFGGGTKLTVL |
| 198. | DL_1xCD3- | Bispecific | QVQLQESGPGLVKPSETLSLTCTVSGGSISSYYWSWIRQPPGKGLEW |
| | scFc | HLE | IGYVYYSGTTNYNPSLKSRVTISVDTSKNQFSLKLSSVTAADTAVYY |
| | | molecule | CASIAVTGFYFDYWGQGTLVTVSSGGGGSGGGGSGGGGSEIVLTQSP |
| | | | GTLSLSPGERVTLSCRASQRVNNNYLAWYQQRPGQAPRLLIYGASSR |
| | | | ATGIPDRFSGSGSGTDFTLTISRLEPEDFAVYYCQQYDRSPLTFGGG |
| | | | TKLEIKSGGGGSEVQLVESGGGLVQPGGSLKLSCAASGFTFNKYAMN |
| | | | WVRQAPGKGLEWVARIRSKYNNYATYYADSVKDRFTISRDDSKNTAY |
| | | | LQMNNLKTEDTAVYYCVRHGNFGNSYISYWAYWGQGTLVTVSSGGGG |
| | | | SGGGGSGGGGSQTVVTQEPSLTVSPGGTVTLTCGSSTGAVTSGNYPN |
| | | | WVQQKPGQAPRGLIGGTKFLAPGTPARFSGSLLGGKAALTLSGVQPE |
| | | | DEAEYYCVLWYSNRWVFGGGTKLTVLGGGGDKTHTCPPCPAPELLGG |
| | | | PSVFLFPPKPKDTLMISRTPEVTCVVVDVSHEDPEVKFNWYVDGVEV |
| | | | HNAKTKPCEEQYGSTYRCVSVLTVLHQDWLNGKEYKCKVSNKALPAP |
| | | | IEKTISKAKGQPREPQVYTLPPSREEMTKNQVSLTCLVKGFYPSDIA |
| | | | VEWESNGQPENNYKTTPPVLDSDGSFFLYSKLTVDKSRWQQGNVFSC |
| | | | SVMHEALHNHYTQKSLSLSPGKGGGGSGGGGSGGGGSGGGGSGGGGS |
| | | | GGGGSDKTHTCPPCPAPELLGGPSVFLFPPKPKDTLMISRTPEVTCV |
| | | | VVDVSHEDPEVKFNWYVDGVEVHNAKTKPCEEQYGSTYRCVSVLTVL |
| | | | HQDWLNGKEYKCKVSNKALPAPIEKTISKAKGQPREPQVYTLPPSRE |
| | | | EMTKNQVSLTCLVKGFYPSDIAVEWESNGQPENNYKTTPPVLDSDGS |
| | | | FFLYSKLTVDKSRWQQGNVFSCSVMHEALHNHYTQKSLSLSPGK |
| 199. | DL_1xCD3- | Bispecific | QVQLQESGPGLVKPSETLSLTCTVSGGSISSYYWSWIRQPPGKGLEW |
| | scFc_delGK | HLE | IGYVYYSGTTNYNPSLKSRVTISVDTSKNQFSLKLSSVTAADTAVYY |
| | | molecule | CASIAVTGFYFDYWGQGTLVTVSSGGGGSGGGGSGGGGSEIVLTQSP |
| | | | GTLSLSPGERVTLSCRASQRVNNNYLAWYQQRPGQAPRLLIYGASSR |
| | | | ATGIPDRFSGSGSGTDFTLTISRLEPEDFAVYYCQQYDRSPLTFGGG |
| | | | TKLEIKSGGGGSEVQLVESGGGLVQPGGSLKLSCAASGFTFNKYAMN |
| | | | WVRQAPGKGLEWVARIRSKYNNYATYYADSVKDRFTISRDDSKNTAY |
| | | | LQMNNLKTEDTAVYYCVRHGNFGNSYISYWAYWGQGTLVTVSSGGGG |
| | | | SGGGGSGGGGSQTVVTQEPSLTVSPGGTVTLTCGSSTGAVTSGNYPN |
| | | | WVQQKPGQAPRGLIGGTKFLAPGTPARFSGSLLGGKAALTLSGVQPE |
| | | | DEAEYYCVLWYSNRWVFGGGTKLTVLGGGGDKTHTCPPCPAPELLGG |
| | | | PSVFLFPPKPKDTLMISRTPEVTCVVVDVSHEDPEVKFNWYVDGVEV |
| | | | HNAKTKPCEEQYGSTYRCVSVLTVLHQDWLNGKEYKCKVSNKALPAP |
| | | | IEKTISKAKGQPREPQVYTLPPSREEMTKNQVSLTCLVKGFYPSDIA |
| | | | VEWESNGQPENNYKTTPPVLDSDGSFFLYSKLTVDKSRWQQGNVFSC |
| | | | SVMHEALHNHYTQKSLSLSPGGGGSGGGGSGGGGSGGGGSGGGGSGG |
| | | | GGSDKTHTCPPCPAPELLGGPSVFLFPPKPKDTLMISRTPEVTCVVV |
| | | | DVSHEDPEVKFNWYVDGVEVHNAKTKPCEEQYGSTYRCVSVLTVLHQ |
| | | | DWLNGKEYKCKVSNKALPAPIEKTISKAKGQPREPQVYTLPPSREEM |
| | | | TKNQVSLTCLVKGFYPSDIAVEWESNGQPENNYKTTPPVLDSDGSFF |
| | | | LYSKLTVDKSRWQQGNVFSCSVMHEALHNHYTQKSLSLSPGK |
| 200. | DL_1_CCxCD | VH | QVQLQESGPGLVKPSETLSLTCTVSGGSISSYYWSWIRQPPGKCLEW |
| | 3-scFc | | IGYVYYSGTTNYNPSLKSRVTISVDTSKNQFSLKLSSVTAADTAVYY |
| | | | CASIAVTGFYFDYWGQGTLVTVSS |
| 201. | DL_1_CCxCD | VL | EIVLTQSPGTLSLSPGERVTLSCRASQRVNNNYLAWYQQRPGQAPRL |
| | 3-scFc | | LIYGASSRATGIPDRFSGSGSGTDFTLTISRLEPEDFAVYYCQQYDR |
| | | | SPLTFGCGTKLEIK |
| 202. | DL_1_CCxCD | scFv | QVQLQESGPGLVKPSETLSLTCTVSGGSISSYYWSWIRQPPGKCLEW |
| | 3-scFc | | IGYVYYSGTTNYNPSLKSRVTISVDTSKNQFSLKLSSVTAADTAVYY |
| | | | CASIAVTGFYFDYWGQGTLVTVSSGGGGSGGGGSGGGGSEIVLTQSP |
| | | | GTLSLSPGERVTLSCRASQRVNNNYLAWYQQRPGQAPRLLIYGASSR |
| | | | ATGIPDRFSGSGSGTDFTLTISRLEPEDFAVYYCQQYDRSPLTFGCG |
| | | | TKLEIK |
| 203. | DL_1_CCxCD | Bispecific | QVQLQESGPGLVKPSETLSLTCTVSGGSISSYYWSWIRQPPGKCLEW |
| | 3-scFc | molecule | IGYVYYSGTTNYNPSLKSRVTISVDTSKNQFSLKLSSVTAADTAVYY |
| | | | CASIAVTGFYFDYWGQGTLVTVSSGGGGSGGGGSGGGGSEIVLTQSP |
| | | | GTLSLSPGERVTLSCRASQRVNNNYLAWYQQRPGQAPRLLIYGASSR |
| | | | ATGIPDRFSGSGSGTDFTLTISRLEPEDFAVYYCQQYDRSPLTFGCG |
| | | | TKLEIKSGGGGSEVQLVESGGGLVQPGGSLKLSCAASGFTFNKYAMN |
| | | | WVRQAPGKGLEWVARIRSKYNNYATYYADSVKDRFTISRDDSKNTAY |
| | | | LQMNNLKTEDTAVYYCVRHGNFGNSYISYWAYWGQGTLVTVSSGGGG |
| | | | SGGGGSGGGGSQTVVTQEPSLTVSPGGTVTLTCGSSTGAVTSGNYPN |
| | | | WVQQKPGQAPRGLIGGTKFLAPGTPARFSGSLLGGKAALTLSGVQPE |
| | | | DEAEYYCVLWYSNRWVFGGGTKLTVL |
| 204. | DL_1_CCxCD | Bispecific | QVQLQESGPGLVKPSETLSLTCTVSGGSISSYYWSWIRQPPGKCLEW |
| | 3-scFc | HLE | IGYVYYSGTTNYNPSLKSRVTISVDTSKNQFSLKLSSVTAADTAVYY |
| | | molecule | CASIAVTGFYFDYWGQGTLVTVSSGGGGSGGGGSGGGGSEIVLTQSP |
| | | | GTLSLSPGERVTLSCRASQRVNNNYLAWYQQRPGQAPRLLIYGASSR |
| | | | ATGIPDRFSGSGSGTDFTLTISRLEPEDFAVYYCQQYDRSPLTFGCG |
| | | | TKLEIKSGGGGSEVQLVESGGGLVQPGGSLKLSCAASGFTFNKYAMN |
| | | | WVRQAPGKGLEWVARIRSKYNNYATYYADSVKDRFTISRDDSKNTAY |
| | | | LQMNNLKTEDTAVYYCVRHGNFGNSYISYWAYWGQGTLVTVSSGGGG |
| | | | SGGGGSGGGGSQTVVTQEPSLTVSPGGTVTLTCGSSTGAVTSGNYPN |
| | | | WVQQKPGQAPRGLIGGTKFLAPGTPARFSGSLLGGKAALTLSGVQPE |
| | | | DEAEYYCVLWYSNRWVFGGGTKLTVLGGGGDKTHTCPPCPAPELLGG |
| | | | PSVFLFPPKPKDTLMISRTPEVTCVVVDVSHEDPEVKFNWYVDGVEV |
| | | | HNAKTKPCEEQYGSTYRCVSVLTVLHQDWLNGKEYKCKVSNKALPAP |
| | | | IEKTISKAKGQPREPQVYTLPPSREEMTKNQVSLTCLVKGFYPSDIA |
| | | | VEWESNGQPENNYKTTPPVLDSDGSFFLYSKLTVDKSRWQQGNVFSC |
| | | | SVMHEALHNHYTQKSLSLSPGKGGGGSGGGGSGGGGSGGGGSGGGGS |
| | | | GGGGSDKTHTCPPCPAPELLGGPSVFLFPPKPKDTLMISRTPEVTCV |
| | | | VVDVSHEDPEVKFNWYVDGVEVHNAKTKPCEEQYGSTYRCVSVLTVL |
| | | | HQDWLNGKEYKCKVSNKALPAPIEKTISKAKGQPREPQVYTLPPSRE |
| | | | EMTKNQVSLTCLVKGFYPSDIAVEWESNGQPENNYKTTPPVLDSDGS |
| | | | FFLYSKLTVDKSRWQQGNVFSCSVMHEALHNHYTQKSLSLSPGK |
| 205. | DL_1_ | Bispecific | QVQLQESGPGLVKPSETLSLTCTVSGGSISSYYWSWIRQPPGKCLEW |
| | CCxCD3- | HLE | IGYVYYSGTTNYNPSLKSRVTISVDTSKNQFSLKLSSVTAADTAVYY |
| | scFc_delGK | molecule | CASIAVTGFYFDYWGQGTLVTVSSGGGGSGGGGSGGGGSEIVLTQSP |
| | | | GTLSLSPGERVTLSCRASQRVNNNYLAWYQQRPGQAPRLLIYGASSR |
| | | | ATGIPDRFSGSGSGTDFTLTISRLEPEDFAVYYCQQYDRSPLTFGCG |
| | | | TKLEIKSGGGGSEVQLVESGGGLVQPGGSLKLSCAASGFTFNKYAMN |
| | | | WVRQAPGKGLEWVARIRSKYNNYATYYADSVKDRFTISRDDSKNTAY |
| | | | LQMNNLKTEDTAVYYCVRHGNFGNSYISYWAYWGQGTLVTVSSGGGG |
| | | | SGGGGSGGGGSQTVVTQEPSLTVSPGGTVTLTCGSSTGAVTSGNYPN |
| | | | WVQQKPGQAPRGLIGGTKFLAPGTPARFSGSLLGGKAALTLSGVQPE |
| | | | DEAEYYCVLWYSNRWVFGGGTKLTVLGGGGDKTHTCPPCPAPELLGG |
| | | | PSVFLFPPKPKDTLMISRTPEVTCVVVDVSHEDPEVKFNWYVDGVEV |
| | | | HNAKTKPCEEQYGSTYRCVSVLTVLHQDWLNGKEYKCKVSNKALPAP |
| | | | IEKTISKAKGQPREPQVYTLPPSREEMTKNQVSLTCLVKGFYPSDIA |
| | | | VEWESNGQPENNYKTTPPVLDSDGSFFLYSKLTVDKSRWQQGNVFSC |
| | | | SVMHEALHNHYTQKSLSLSPGGGGSGGGGSGGGGSGGGGSGGGGSGG |
| | | | GGSDKTHTCPPCPAPELLGGPSVFLFPPKPKDTLMISRTPEVTCVVV |
| | | | DVSHEDPEVKFNWYVDGVEVHNAKTKPCEEQYGSTYRCVSVLTVLHQ |
| | | | DWLNGKEYKCKVSNKALPAPIEKTISKAKGQPREPQVYTLPPSREEM |
| | | | TKNQVSLTCLVKGFYPSDIAVEWESNGQPENNYKTTPPVLDSDGSFF |
| | | | LYSKLTVDKSRWQQGNVFSCSVMHEALHNHYTQKSLSLSPGK |
| 206. | DL_2xCD3- | VH CDR1 | SFYWS |
| | scFc | | |
| 207. | DL_2xCD3- | VH CDR2 | YIYYSGTTNYNPSLKS |
| | scFc | | |
| 208. | DL_2xCD3- | VH CDR3 | IAVAGFFFDY |
| | scFc | | |
| 209. | DL_2xCD3- | VL CDR1 | RASQSVNKNYLA |
| | scFc | | |
| 210. | DL_2xCD3- | VL CDR2 | GASSRAT |
| | scFc | | |
| 211. | DL_2xCD3- | VL CDR3 | QQYDRSPLT |
| | scFc | | |
| 212. | DL_2xCD3- | VH | QVQLQESGPGLVKPSETLSLTCTVSGASISSFYWSWIRQPPGKGLEW |
| | scFc | | IGYIYYSGTTNYNPSLKSRVTISVDTSKNQFSLKLSSVTAADTAVYY |
| | | | CARIAVAGFFFDYWGQGTLVTVSS |
| 213. | DL_2xCD3- | VL | EIVLTQSPGTLSLSPGERATLSCRASQSVNKNYLAWYQQKPGQAPRL |
| | scFc | | LIYGASSRATGIPDRFSGSGSGTDFTLTISRLEPEDFAVYYCQQYDR |
| | | | SPLTFGGGTKVEIK |
| 214. | DL_2xCD3- | scFv | QVQLQESGPGLVKPSETLSLTCTVSGASISSFYWSWIRQPPGKGLEW |
| | scFc | | IGYIYYSGTTNYNPSLKSRVTISVDTSKNQFSLKLSSVTAADTAVYY |
| | | | CARIAVAGFFFDYWGQGTLVTVSSGGGGSGGGGSGGGGSEIVLTQSP |
| | | | GTLSLSPGERATLSCRASQSVNKNYLAWYQQKPGQAPRLLIYGASSR |
| | | | ATGIPDRFSGSGSGTDFTLTISRLEPEDFAVYYCQQYDRSPLTFGGG |
| | | | TKVEIK |
| 215. | DL_2xCD3- | Bispecific | QVQLQESGPGLVKPSETLSLTCTVSGASISSFYWSWIRQPPGKGLEW |
| | scFc | molecule | IGYIYYSGTTNYNPSLKSRVTISVDTSKNQFSLKLSSVTAADTAVYY |
| | | | CARIAVAGFFFDYWGQGTLVTVSSGGGGSGGGGSGGGGSEIVLTQSP |
| | | | GTLSLSPGERATLSCRASQSVNKNYLAWYQQKPGQAPRLLIYGASSR |
| | | | ATGIPDRFSGSGSGTDFTLTISRLEPEDFAVYYCQQYDRSPLTFGGG |
| | | | TKVEIKSGGGGSEVQLVESGGGLVQPGGSLKLSCAASGFTFNKYAMN |
| | | | WVRQAPGKGLEWVARIRSKYNNYATYYADSVKDRFTISRDDSKNTAY |
| | | | LQMNNLKTEDTAVYYCVRHGNFGNSYISYWAYWGQGTLVTVSSGGGG |
| | | | SGGGGSGGGGSQTVVTQEPSLTVSPGGTVTLTCGSSTGAVTSGNYPN |
| | | | WVQQKPGQAPRGLIGGTKFLAPGTPARFSGSLLGGKAALTLSGVQPE |
| | | | DEAEYYCVLWYSNRWVFGGGTKLTVL |
| 216. | DL_2xCD3- | Bispecific | QVQLQESGPGLVKPSETLSLTCTVSGASISSFYWSWIRQPPGKGLEW |
| | scFc | HLE | IGYIYYSGTTNYNPSLKSRVTISVDTSKNQFSLKLSSVTAADTAVYY |
| | | molecule | CARIAVAGFFFDYWGQGTLVTVSSGGGGSGGGGSGGGGSEIVLTQSP |
| | | | GTLSLSPGERATLSCRASQSVNKNYLAWYQQKPGQAPRLLIYGASSR |
| | | | ATGIPDRFSGSGSGTDFTLTISRLEPEDFAVYYCQQYDRSPLTFGGG |
| | | | TKVEIKSGGGGSEVQLVESGGGLVQPGGSLKLSCAASGFTFNKYAMN |
| | | | WVRQAPGKGLEWVARIRSKYNNYATYYADSVKDRFTISRDDSKNTAY |
| | | | LQMNNLKTEDTAVYYCVRHGNFGNSYISYWAYWGQGTLVTVSSGGGG |
| | | | SGGGGSGGGGSQTVVTQEPSLTVSPGGTVTLTCGSSTGAVTSGNYPN |
| | | | WVQQKPGQAPRGLIGGTKFLAPGTPARFSGSLLGGKAALTLSGVQPE |
| | | | DEAEYYCVLWYSNRWVFGGGTKLTVLGGGGDKTHTCPPCPAPELLGG |
| | | | PSVFLFPPKPKDTLMISRTPEVTCVVVDVSHEDPEVKFNWYVDGVEV |
| | | | HNAKTKPCEEQYGSTYRCVSVLTVLHQDWLNGKEYKCKVSNKALPAP |
| | | | IEKTISKAKGQPREPQVYTLPPSREEMTKNQVSLTCLVKGFYPSDIA |
| | | | VEWESNGQPENNYKTTPPVLDSDGSFFLYSKLTVDKSRWQQGNVFSC |
| | | | SVMHEALHNHYTQKSLSLSPGKGGGGSGGGGSGGGGSGGGGSGGGGS |
| | | | GGGGSDKTHTCPPCPAPELLGGPSVFLFPPKPKDTLMISRTPEVTCV |
| | | | VVDVSHEDPEVKFNWYVDGVEVHNAKTKPCEEQYGSTYRCVSVLTVL |
| | | | HQDWLNGKEYKCKVSNKALPAPIEKTISKAKGQPREPQVYTLPPSRE |
| | | | EMTKNQVSLTCLVKGFYPSDIAVEWESNGQPENNYKTTPPVLDSDGS |
| | | | FFLYSKLTVDKSRWQQGNVFSCSVMHEALHNHYTQKSLSLSPGK |
| 217. | DL_2xCD3- | Bispecific | QVQLQESGPGLVKPSETLSLTCTVSGASISSFYWSWIRQPPGKGLEW |
| | scFc_delGK | HLE | IGYIYYSGTTNYNPSLKSRVTISVDTSKNQFSLKLSSVTAADTAVYY |
| | | molecule | CARIAVAGFFFDYWGQGTLVTVSSGGGGSGGGGSGGGGSEIVLTQSP |
| | | | GTLSLSPGERATLSCRASQSVNKNYLAWYQQKPGQAPRLLIYGASSR |
| | | | ATGIPDRFSGSGSGTDFTLTISRLEPEDFAVYYCQQYDRSPLTFGGG |
| | | | TKVEIKSGGGGSEVQLVESGGGLVQPGGSLKLSCAASGFTFNKYAMN |
| | | | WVRQAPGKGLEWVARIRSKYNNYATYYADSVKDRFTISRDDSKNTAY |
| | | | LQMNNLKTEDTAVYYCVRHGNFGNSYISYWAYWGQGTLVTVSSGGGG |
| | | | SGGGGSGGGGSQTVVTQEPSLTVSPGGTVTLTCGSSTGAVTSGNYPN |
| | | | WVQQKPGQAPRGLIGGTKFLAPGTPARFSGSLLGGKAALTLSGVQPE |
| | | | DEAEYYCVLWYSNRWVFGGGTKLTVLGGGGDKTHTCPPCPAPELLGG |
| | | | PSVFLFPPKPKDTLMISRTPEVTCVVVDVSHEDPEVKFNWYVDGVEV |
| | | | HNAKTKPCEEQYGSTYRCVSVLTVLHQDWLNGKEYKCKVSNKALPAP |
| | | | IEKTISKAKGQPREPQVYTLPPSREEMTKNQVSLTCLVKGFYPSDIA |
| | | | VEWESNGQPENNYKTTPPVLDSDGSFFLYSKLTVDKSRWQQGNVFSC |
| | | | SVMHEALHNHYTQKSLSLSPGGGGSGGGGSGGGGSGGGGSGGGGSGG |
| | | | GGSDKTHTCPPCPAPELLGGPSVFLFPPKPKDTLMISRTPEVTCVVV |
| | | | DVSHEDPEVKFNWYVDGVEVHNAKTKPCEEQYGSTYRCVSVLTVLHQ |
| | | | DWLNGKEYKCKVSNKALPAPIEKTISKAKGQPREPQVYTLPPSREEM |
| | | | TKNQVSLTCLVKGFYPSDIAVEWESNGQPENNYKTTPPVLDSDGSFF |
| | | | LYSKLTVDKSRWQQGNVFSCSVMHEALHNHYTQKSLSLSPGK |
| 218. | DL_2_CCxCD | VH | QVQLQESGPGLVKPSETLSLTCTVSGASISSFYWSWIRQPPGKCLEW |
| | 3-scFc | | IGYIYYSGTTNYNPSLKSRVTISVDTSKNQFSLKLSSVTAADTAVYY |
| | | | CARIAVAGFFFDYWGQGTLVTVSS |
| 219. | DL_2_CCxCD | VL | EIVLTQSPGTLSLSPGERATLSCRASQSVNKNYLAWYQQKPGQAPRL |
| | 3-scFc | | LIYGASSRATGIPDRFSGSGSGTDFTLTISRLEPEDFAVYYCQQYDR |
| | | | SPLTFGCGTKVEIK |
| 220. | DL_2_CCxCD | scFv | QVQLQESGPGLVKPSETLSLTCTVSGASISSFYWSWIRQPPGKCLEW |
| | 3-scFc | | IGYIYYSGTTNYNPSLKSRVTISVDTSKNQFSLKLSSVTAADTAVYY |
| | | | CARIAVAGFFFDYWGQGTLVTVSSGGGGSGGGGSGGGGSEIVLTQSP |
| | | | GTLSLSPGERATLSCRASQSVNKNYLAWYQQKPGQAPRLLIYGASSR |
| | | | ATGIPDRFSGSGSGTDFTLTISRLEPEDFAVYYCQQYDRSPLTFGCG |
| | | | TKVEIK |
| 221. | DL_2_CCxCD | Bispecific | QVQLQESGPGLVKPSETLSLTCTVSGASISSFYWSWIRQPPGKCLEW |
| | 3-scFc | molecule | IGYIYYSGTTNYNPSLKSRVTISVDTSKNQFSLKLSSVTAADTAVYY |
| | | | CARIAVAGFFFDYWGQGTLVTVSSGGGGSGGGGSGGGGSEIVLTQSP |
| | | | GTLSLSPGERATLSCRASQSVNKNYLAWYQQKPGQAPRLLIYGASSR |
| | | | ATGIPDRFSGSGSGTDFTLTISRLEPEDFAVYYCQQYDRSPLTFGCG |
| | | | TKVEIKSGGGGSEVQLVESGGGLVQPGGSLKLSCAASGFTFNKYAMN |
| | | | WVRQAPGKGLEWVARIRSKYNNYATYYADSVKDRFTISRDDSKNTAY |
| | | | LQMNNLKTEDTAVYYCVRHGNFGNSYISYWAYWGQGTLVTVSSGGGG |
| | | | SGGGGSGGGGSQTVVTQEPSLTVSPGGTVTLTCGSSTGAVTSGNYPN |
| | | | WVQQKPGQAPRGLIGGTKFLAPGTPARFSGSLLGGKAALTLSGVQPE |
| | | | DEAEYYCVLWYSNRWVFGGGTKLTVL |
| 222. | DL_2_CCxCD | Bispecific | QVQLQESGPGLVKPSETLSLTCTVSGASISSFYWSWIRQPPGKCLEW |
| | 3-scFc | HLE | IGYIYYSGTTNYNPSLKSRVTISVDTSKNQFSLKLSSVTAADTAVYY |
| | | molecule | CARIAVAGFFFDYWGQGTLVTVSSGGGGSGGGGSGGGGSEIVLTQSP |
| | | | GTLSLSPGERATLSCRASQSVNKNYLAWYQQKPGQAPRLLIYGASSR |
| | | | ATGIPDRFSGSGSGTDFTLTISRLEPEDFAVYYCQQYDRSPLTFGCG |
| | | | TKVEIKSGGGGSEVQLVESGGGLVQPGGSLKLSCAASGFTFNKYAMN |
| | | | WVRQAPGKGLEWVARIRSKYNNYATYYADSVKDRFTISRDDSKNTAY |
| | | | LQMNNLKTEDTAVYYCVRHGNFGNSYISYWAYWGQGTLVTVSSGGGG |
| | | | SGGGGSGGGGSQTVVTQEPSLTVSPGGTVTLTCGSSTGAVTSGNYPN |
| | | | WVQQKPGQAPRGLIGGTKFLAPGTPARFSGSLLGGKAALTLSGVQPE |
| | | | DEAEYYCVLWYSNRWVFGGGTKLTVLGGGGDKTHTCPPCPAPELLGG |
| | | | PSVFLFPPKPKDTLMISRTPEVTCVVVDVSHEDPEVKFNWYVDGVEV |
| | | | HNAKTKPCEEQYGSTYRCVSVLTVLHQDWLNGKEYKCKVSNKALPAP |
| | | | IEKTISKAKGQPREPQVYTLPPSREEMTKNQVSLTCLVKGFYPSDIA |
| | | | VEWESNGQPENNYKTTPPVLDSDGSFFLYSKLTVDKSRWQQGNVFSC |
| | | | SVMHEALHNHYTQKSLSLSPGKGGGGSGGGGSGGGGSGGGGSGGGGS |
| | | | GGGGSDKTHTCPPCPAPELLGGPSVFLFPPKPKDTLMISRTPEVTCV |
| | | | VVDVSHEDPEVKFNWYVDGVEVHNAKTKPCEEQYGSTYRCVSVLTVL |
| | | | HQDWLNGKEYKCKVSNKALPAPIEKTISKAKGQPREPQVYTLPPSRE |
| | | | EMTKNQVSLTCLVKGFYPSDIAVEWESNGQPENNYKTTPPVLDSDGS |
| | | | FFLYSKLTVDKSRWQQGNVFSCSVMHEALHNHYTQKSLSLSPGK |
| 223. | DL_2_ | Bispecific | QVQLQESGPGLVKPSETLSLTCTVSGASISSFYWSWIRQPPGKCLEW |
| | CCxCD3- | HLE | IGYIYYSGTTNYNPSLKSRVTISVDTSKNQFSLKLSSVTAADTAVYY |
| | scFc_delGK | molecule | CARIAVAGFFFDYWGQGTLVTVSSGGGGSGGGGSGGGGSEIVLTQSP |
| | | | GTLSLSPGERATLSCRASQSVNKNYLAWYQQKPGQAPRLLIYGASSR |
| | | | ATGIPDRFSGSGSGTDFTLTISRLEPEDFAVYYCQQYDRSPLTFGCG |
| | | | TKVEIKSGGGGSEVQLVESGGGLVQPGGSLKLSCAASGFTFNKYAMN |
| | | | WVRQAPGKGLEWVARIRSKYNNYATYYADSVKDRFTISRDDSKNTAY |
| | | | LQMNNLKTEDTAVYYCVRHGNFGNSYISYWAYWGQGTLVTVSSGGGG |
| | | | SGGGGSGGGGSQTVVTQEPSLTVSPGGTVTLTCGSSTGAVTSGNYPN |
| | | | WVQQKPGQAPRGLIGGTKFLAPGTPARFSGSLLGGKAALTLSGVQPE |
| | | | DEAEYYCVLWYSNRWVFGGGTKLTVLGGGGDKTHTCPPCPAPELLGG |
| | | | PSVFLFPPKPKDTLMISRTPEVTCVVVDVSHEDPEVKFNWYVDGVEV |
| | | | HNAKTKPCEEQYGSTYRCVSVLTVLHQDWLNGKEYKCKVSNKALPAP |
| | | | IEKTISKAKGQPREPQVYTLPPSREEMTKNQVSLTCLVKGFYPSDIA |
| | | | VEWESNGQPENNYKTTPPVLDSDGSFFLYSKLTVDKSRWQQGNVFSC |
| | | | SVMHEALHNHYTQKSLSLSPGGGGSGGGGSGGGGSGGGGSGGGGSGG |
| | | | GGSDKTHTCPPCPAPELLGGPSVFLFPPKPKDTLMISRTPEVTCVVV |
| | | | DVSHEDPEVKFNWYVDGVEVHNAKTKPCEEQYGSTYRCVSVLTVLHQ |
| | | | DWLNGKEYKCKVSNKALPAPIEKTISKAKGQPREPQVYTLPPSREEM |
| | | | TKNQVSLTCLVKGFYPSDIAVEWESNGQPENNYKTTPPVLDSDGSFF |
| | | | LYSKLTVDKSRWQQGNVFSCSVMHEALHNHYTQKSLSLSPGK |
| 224. | DL_3xCD3- | VH CDR1 | NYYMH |
| | scFc | | |
| 225. | DL_3xCD3- | VH CDR2 | IINPSDGSTSYAQKFQG |
| | scFc | | |
| 226. | DL_3xCD3- | VH CDR3 | GGNSAFYSYYDMDV |
| | scFc | | |
| 227. | DL_3xCD3- | VL CDR1 | RSSQSLVYRDGNTYLS |
| | scFc | | |
| 228. | DL_3xCD3- | VL CDR2 | KVSNWQS |
| | scFc | | |
| 229. | DL_3xCD3- | VL CDR3 | MQGTHWPPT |
| | scFc | | |
| 230. | DL_3xCD3- | VH | QVQLVQSGAEVKKPGASVKVSCKASGYTFTNYYMHWVRQAPGLGLEW |
| | scFc | | MGIINPSDGSTSYAQKFQGRVTMTRDTSTNTVYMDLSSLRSEDTAVY |
| | | | YCARGGNSAFYSYYDMDVWGQGTTVTVSS |
| 231. | DL_3xCD3- | VL | DVVMTQTPLSLPVTLGQPASISCRSSQSLVYRDGNTYLSWFQQRPGQ |
| | scFc | | SPRRLIYKVSNWQSGVPDRFSGGGSGTDFTLKISRVEAEDVGVYYCM |
| | | | QGTHWPPTFGQGTKVEIK |
| 232. | DL_3xCD3- | scFv | QVQLVQSGAEVKKPGASVKVSCKASGYTFTNYYMHWVRQAPGLGLEW |
| | scFc | | MGIINPSDGSTSYAQKFQGRVTMTRDTSTNTVYMDLSSLRSEDTAVY |
| | | | YCARGGNSAFYSYYDMDVWGQGTTVTVSSGGGGSGGGGSGGGGSDVV |
| | | | MTQTPLSLPVTLGQPASISCRSSQSLVYRDGNTYLSWFQQRPGQSPR |
| | | | RLIYKVSNWQSGVPDRFSGGGSGTDFTLKISRVEAEDVGVYYCMQGT |
| | | | HWPPTFGQGTKVEIK |
| 233. | DL_3xCD3- | Bispecific | QVQLVQSGAEVKKPGASVKVSCKASGYTFTNYYMHWVRQAPGLGLEW |
| | scFc | molecule | MGIINPSDGSTSYAQKFQGRVTMTRDTSTNTVYMDLSSLRSEDTAVY |
| | | | YCARGGNSAFYSYYDMDVWGQGTTVTVSSGGGGSGGGGSGGGGSDVV |
| | | | MTQTPLSLPVTLGQPASISCRSSQSLVYRDGNTYLSWFQQRPGQSPR |
| | | | RLIYKVSNWQSGVPDRFSGGGSGTDFTLKISRVEAEDVGVYYCMQGT |
| | | | HWPPTFGQGTKVEIKSGGGGSEVQLVESGGGLVQPGGSLKLSCAASG |
| | | | FTFNKYAMNWVRQAPGKGLEWVARIRSKYNNYATYYADSVKDRFTIS |
| | | | RDDSKNTAYLQMNNLKTEDTAVYYCVRHGNFGNSYISYWAYWGQGTL |
| | | | VTVSSGGGGSGGGGSGGGGSQTVVTQEPSLTVSPGGTVTLTCGSSTG |
| | | | AVTSGNYPNWVQQKPGQAPRGLIGGTKFLAPGTPARFSGSLLGGKAA |
| | | | LTLSGVQPEDEAEYYCVLWYSNRWVFGGGTKLTVL |
| 234. | DL_3xCD3- | Bispecific | QVQLVQSGAEVKKPGASVKVSCKASGYTFTNYYMHWVRQAPGLGLEW |
| | scFc | HLE | MGIINPSDGSTSYAQKFQGRVTMTRDTSTNTVYMDLSSLRSEDTAVY |
| | | molecule | YCARGGNSAFYSYYDMDVWGQGTTVTVSSGGGGSGGGGSGGGGSDVV |
| | | | MTQTPLSLPVTLGQPASISCRSSQSLVYRDGNTYLSWFQQRPGQSPR |
| | | | RLIYKVSNWQSGVPDRFSGGGSGTDFTLKISRVEAEDVGVYYCMQGT |
| | | | HWPPTFGQGTKVEIKSGGGGSEVQLVESGGGLVQPGGSLKLSCAASG |
| | | | FTFNKYAMNWVRQAPGKGLEWVARIRSKYNNYATYYADSVKDRFTIS |
| | | | RDDSKNTAYLQMNNLKTEDTAVYYCVRHGNFGNSYISYWAYWGQGTL |
| | | | VTVSSGGGGSGGGGSGGGGSQTVVTQEPSLTVSPGGTVTLTCGSSTG |
| | | | AVTSGNYPNWVQQKPGQAPRGLIGGTKFLAPGTPARFSGSLLGGKAA |
| | | | LTLSGVQPEDEAEYYCVLWYSNRWVFGGGTKLTVLGGGGDKTHTCPP |
| | | | CPAPELLGGPSVFLFPPKPKDTLMISRTPEVTCVVVDVSHEDPEVKF |
| | | | NWYVDGVEVHNAKTKPCEEQYGSTYRCVSVLTVLHQDWLNGKEYKCK |
| | | | VSNKALPAPIEKTISKAKGQPREPQVYTLPPSREEMTKNQVSLTCLV |
| | | | KGFYPSDIAVEWESNGQPENNYKTTPPVLDSDGSFFLYSKLTVDKSR |
| | | | WQQGNVFSCSVMHEALHNHYTQKSLSLSPGKGGGGSGGGGSGGGGSG |
| | | | GGGSGGGGSGGGGSDKTHTCPPCPAPELLGGPSVFLFPPKPKDTLMI |
| | | | SRTPEVTCVVVDVSHEDPEVKFNWYVDGVEVHNAKTKPCEEQYGSTY |
| | | | RCVSVLTVLHQDWLNGKEYKCKVSNKALPAPIEKTISKAKGQPREPQ |
| | | | VYTLPPSREEMTKNQVSLTCLVKGFYPSDIAVEWESNGQPENNYKTT |
| | | | PPVLDSDGSFFLYSKLTVDKSRWQQGNVFSCSVMHEALHNHYTQKSL |
| | | | SLSPGK |
| 235. | DL_3xCD3- | Bispecific | QVQLVQSGAEVKKPGASVKVSCKASGYTFTNYYMHWVRQAPGLGLEW |
| | scFc_delGK | HLE | MGIINPSDGSTSYAQKFQGRVTMTRDTSTNTVYMDLSSLRSEDTAVY |
| | | molecule | YCARGGNSAFYSYYDMDVWGQGTTVTVSSGGGGSGGGGSGGGGSDVV |
| | | | MTQTPLSLPVTLGQPASISCRSSQSLVYRDGNTYLSWFQQRPGQSPR |
| | | | RLIYKVSNWQSGVPDRFSGGGSGTDFTLKISRVEAEDVGVYYCMQGT |
| | | | HWPPTFGQGTKVEIKSGGGGSEVQLVESGGGLVQPGGSLKLSCAASG |
| | | | FTFNKYAMNWVRQAPGKGLEWVARIRSKYNNYATYYADSVKDRFTIS |
| | | | RDDSKNTAYLQMNNLKTEDTAVYYCVRHGNFGNSYISYWAYWGQGTL |
| | | | VTVSSGGGGSGGGGSGGGGSQTVVTQEPSLTVSPGGTVTLTCGSSTG |
| | | | AVTSGNYPNWVQQKPGQAPRGLIGGTKFLAPGTPARFSGSLLGGKAA |
| | | | LTLSGVQPEDEAEYYCVLWYSNRWVFGGGTKLTVLGGGGDKTHTCPP |
| | | | CPAPELLGGPSVFLFPPKPKDTLMISRTPEVTCVVVDVSHEDPEVKF |
| | | | NWYVDGVEVHNAKTKPCEEQYGSTYRCVSVLTVLHQDWLNGKEYKCK |
| | | | VSNKALPAPIEKTISKAKGQPREPQVYTLPPSREEMTKNQVSLTCLV |
| | | | KGFYPSDIAVEWESNGQPENNYKTTPPVLDSDGSFFLYSKLTVDKSR |
| | | | WQQGNVFSCSVMHEALHNHYTQKSLSLSPGGGGSGGGGSGGGGSGGG |
| | | | GSGGGGSGGGGSDKTHTCPPCPAPELLGGPSVFLFPPKPKDTLMISR |
| | | | TPEVTCVVVDVSHEDPEVKFNWYVDGVEVHNAKTKPCEEQYGSTYRC |
| | | | VSVLTVLHQDWLNGKEYKCKVSNKALPAPIEKTISKAKGQPREPQVY |
| | | | TLPPSREEMTKNQVSLTCLVKGFYPSDIAVEWESNGQPENNYKTTPP |
| | | | VLDSDGSFFLYSKLTVDKSRWQQGNVFSCSVMHEALHNHYTQKSLSL |
| | | | SPGK |
| 236. | DL_3_CCxCD | VH | QVQLVQSGAEVKKPGASVKVSCKASGYTFTNYYMHWVRQAPGLCLEW |
| | 3-scFc | | MGIINPSDGSTSYAQKFQGRVTMTRDTSTNTVYMDLSSLRSEDTAVY |
| | | | YCARGGNSAFYSYYDMDVWGQGTTVTVSS |
| 237. | DL_3_CCxCD | VL | DVVMTQTPLSLPVTLGQPASISCRSSQSLVYRDGNTYLSWFQQRPGQ |
| | 3-scFc | | SPRRLIYKVSNWQSGVPDRFSGGGSGTDFTLKISRVEAEDVGVYYCM |
| | | | QGTHWPPTFGCGTKVEIK |
| 238. | DL_3_CCxCD | scFv | QVQLVQSGAEVKKPGASVKVSCKASGYTFTNYYMHWVRQAPGLCLEW |
| | 3-scFc | | MGIINPSDGSTSYAQKFQGRVTMTRDTSTNTVYMDLSSLRSEDTAVY |
| | | | YCARGGNSAFYSYYDMDVWGQGTTVTVSSGGGGSGGGGSGGGGSDVV |
| | | | MTQTPLSLPVTLGQPASISCRSSQSLVYRDGNTYLSWFQQRPGQSPR |
| | | | RLIYKVSNWQSGVPDRFSGGGSGTDFTLKISRVEAEDVGVYYCMQGT |
| | | | HWPPTFGCGTKVEIK |
| 239. | DL_3_CCxCD | Bispecific | QVQLVQSGAEVKKPGASVKVSCKASGYTFTNYYMHWVRQAPGLCLEW |
| | 3-scFc | molecule | MGIINPSDGSTSYAQKFQGRVTMTRDTSTNTVYMDLSSLRSEDTAVY |
| | | | YCARGGNSAFYSYYDMDVWGQGTTVTVSSGGGGSGGGGSGGGGSDVV |
| | | | MTQTPLSLPVTLGQPASISCRSSQSLVYRDGNTYLSWFQQRPGQSPR |
| | | | RLIYKVSNWQSGVPDRFSGGGSGTDFTLKISRVEAEDVGVYYCMQGT |
| | | | HWPPTFGCGTKVEIKSGGGGSEVQLVESGGGLVQPGGSLKLSCAASG |
| | | | FTFNKYAMNWVRQAPGKGLEWVARIRSKYNNYATYYADSVKDRFTIS |
| | | | RDDSKNTAYLQMNNLKTEDTAVYYCVRHGNFGNSYISYWAYWGQGTL |
| | | | VTVSSGGGGSGGGGSGGGGSQTVVTQEPSLTVSPGGTVTLTCGSSTG |
| | | | AVTSGNYPNWVQQKPGQAPRGLIGGTKFLAPGTPARFSGSLLGGKAA |
| | | | LTLSGVQPEDEAEYYCVLWYSNRWVFGGGTKLTVL |
| 240. | DL_3_CCxCD | Bispecific | QVQLVQSGAEVKKPGASVKVSCKASGYTFTNYYMHWVRQAPGLCLEW |
| | 3-scFc | HLE | MGIINPSDGSTSYAQKFQGRVTMTRDTSTNTVYMDLSSLRSEDTAVY |
| | | molecule | YCARGGNSAFYSYYDMDVWGQGTTVTVSSGGGGSGGGGSGGGGSDVV |
| | | | MTQTPLSLPVTLGQPASISCRSSQSLVYRDGNTYLSWFQQRPGQSPR |
| | | | RLIYKVSNWQSGVPDRFSGGGSGTDFTLKISRVEAEDVGVYYCMQGT |
| | | | HWPPTFGCGTKVEIKSGGGGSEVQLVESGGGLVQPGGSLKLSCAASG |
| | | | FTFNKYAMNWVRQAPGKGLEWVARIRSKYNNYATYYADSVKDRFTIS |
| | | | RDDSKNTAYLQMNNLKTEDTAVYYCVRHGNFGNSYISYWAYWGQGTL |
| | | | VTVSSGGGGSGGGGSGGGGSQTVVTQEPSLTVSPGGTVTLTCGSSTG |
| | | | AVTSGNYPNWVQQKPGQAPRGLIGGTKFLAPGTPARFSGSLLGGKAA |
| | | | LTLSGVQPEDEAEYYCVLWYSNRWVFGGGTKLTVLGGGGDKTHTCPP |
| | | | CPAPELLGGPSVFLFPPKPKDTLMISRTPEVTCVVVDVSHEDPEVKF |
| | | | NWYVDGVEVHNAKTKPCEEQYGSTYRCVSVLTVLHQDWLNGKEYKCK |
| | | | VSNKALPAPIEKTISKAKGQPREPQVYTLPPSREEMTKNQVSLTCLV |
| | | | KGFYPSDIAVEWESNGQPENNYKTTPPVLDSDGSFFLYSKLTVDKSR |
| | | | WQQGNVFSCSVMHEALHNHYTQKSLSLSPGKGGGGSGGGGSGGGGSG |
| | | | GGGSGGGGSGGGGSDKTHTCPPCPAPELLGGPSVFLFPPKPKDTLMI |
| | | | SRTPEVTCVVVDVSHEDPEVKFNWYVDGVEVHNAKTKPCEEQYGSTY |
| | | | RCVSVLTVLHQDWLNGKEYKCKVSNKALPAPIEKTISKAKGQPREPQ |
| | | | VYTLPPSREEMTKNQVSLTCLVKGFYPSDIAVEWESNGQPENNYKTT |
| | | | PPVLDSDGSFFLYSKLTVDKSRWQQGNVFSCSVMHEALHNHYTQKSL |
| | | | SLSPGK |
| 241. | DL_3_ | Bispecific | QVQLVQSGAEVKKPGASVKVSCKASGYTFTNYYMHWVRQAPGLCLEW |
| | CCxCD3- | HLE | MGIINPSDGSTSYAQKFQGRVTMTRDTSTNTVYMDLSSLRSEDTAVY |
| | scFc_delGK | molecule | YCARGGNSAFYSYYDMDVWGQGTTVTVSSGGGGSGGGGSGGGGSDVV |
| | | | MTQTPLSLPVTLGQPASISCRSSQSLVYRDGNTYLSWFQQRPGQSPR |
| | | | RLIYKVSNWQSGVPDRFSGGGSGTDFTLKISRVEAEDVGVYYCMQGT |
| | | | HWPPTFGCGTKVEIKSGGGGSEVQLVESGGGLVQPGGSLKLSCAASG |
| | | | FTFNKYAMNWVRQAPGKGLEWVARIRSKYNNYATYYADSVKDRFTIS |
| | | | RDDSKNTAYLQMNNLKTEDTAVYYCVRHGNFGNSYISYWAYWGQGTL |
| | | | VTVSSGGGGSGGGGSGGGGSQTVVTQEPSLTVSPGGTVTLTCGSSTG |
| | | | AVTSGNYPNWVQQKPGQAPRGLIGGTKFLAPGTPARFSGSLLGGKAA |
| | | | LTLSGVQPEDEAEYYCVLWYSNRWVFGGGTKLTVLGGGGDKTHTCPP |
| | | | CPAPELLGGPSVFLFPPKPKDTLMISRTPEVTCVVVDVSHEDPEVKF |
| | | | NWYVDGVEVHNAKTKPCEEQYGSTYRCVSVLTVLHQDWLNGKEYKCK |
| | | | VSNKALPAPIEKTISKAKGQPREPQVYTLPPSREEMTKNQVSLTCLV |
| | | | KGFYPSDIAVEWESNGQPENNYKTTPPVLDSDGSFFLYSKLTVDKSR |
| | | | WQQGNVFSCSVMHEALHNHYTQKSLSLSPGGGGSGGGGSGGGGSGGG |
| | | | GSGGGGSGGGGSDKTHTCPPCPAPELLGGPSVFLFPPKPKDTLMISR |
| | | | TPEVTCVVVDVSHEDPEVKFNWYVDGVEVHNAKTKPCEEQYGSTYRC |
| | | | VSVLTVLHQDWLNGKEYKCKVSNKALPAPIEKTISKAKGQPREPQVY |
| | | | TLPPSREEMTKNQVSLTCLVKGFYPSDIAVEWESNGQPENNYKTTPP |
| | | | VLDSDGSFFLYSKLTVDKSRWQQGNVFSCSVMHEALHNHYTQKSLSL |
| | | | SPGK |
| 242. | C19_1xCD3- | VH CDR1 | SYGVS |
| | scFc | | |
| 243. | C19_1xCD3- | VH CDR2 | YNDPVFGSIYYASWVKG |
| | scFc | | |
| 244. | C19_1xCD3- | VH CDR3 | DRSYVSSSGYHFNL |
| | scFc | | |
| 245. | C19_1xCD3- | VL CDR1 | QASETIYSSLA |
| | scFc | | |
| 246. | C19_1xCD3- | VL CDR2 | GASNLES |
| | scFc | | |
| 247. | C19_1xCD3- | VL CDR3 | QSGVYSAGLT |
| | scFc | | |
| 248. | C19_1xCD3- | VH | EVQLLESGGGLVQPGGSLRLSCAASGFTFSSYGVSWVRQAPGKGLEW |
| | scFc | | IGYNDPVFGSIYYASWVKGRFTISSDNSKNTLYLQMNSLRAEDTAVY |
| | | | YCAKDRSYVSSSGYHFNLWGQGTLVTVSS |
| 249. | C19_1xCD3- | VL | DIQMTQSPSSLSASVGDRVTITCQASETIYSSLAWYQQKPGKPPKLL |
| | scFc | | IYGASNLESGVPSRFSGSGSGTDFTFTISSLQPEDIATYYCQSGVYS |
| | | | AGLTFGGGTKVEIK |
| 250. | C19_1xCD3- | scFv | DIQMTQSPSSLSASVGDRVTITCQASETIYSSLAWYQQKPGKPPKLL |
| | scFc | | IYGASNLESGVPSRFSGSGSGTDFTFTISSLQPEDIATYYCQSGVYS |
| | | | AGLTFGGGTKVEIKGGGGSGGGGSGGGGSEVQLLESGGGLVQPGGSL |
| | | | RLSCAASGFTFSSYGVSWVRQAPGKGLEWIGYNDPVFGSIYYASWVK |
| | | | GRFTISSDNSKNTLYLQMNSLRAEDTAVYYCAKDRSYVSSSGYHFNL |
| | | | WGQGTLVTVSS |
| 251. | C19_1xCD3- | Bispecific | DIQMTQSPSSLSASVGDRVTITCQASETIYSSLAWYQQKPGKPPKLL |
| | scFc | molecule | IYGASNLESGVPSRFSGSGSGTDFTFTISSLQPEDIATYYCQSGVYS |
| | | | AGLTFGGGTKVEIKGGGGSGGGGSGGGGSEVQLLESGGGLVQPGGSL |
| | | | RLSCAASGFTFSSYGVSWVRQAPGKGLEWIGYNDPVFGSIYYASWVK |
| | | | GRFTISSDNSKNTLYLQMNSLRAEDTAVYYCAKDRSYVSSSGYHFNL |
| | | | WGQGTLVTVSSGGGGSEVQLVESGGGLVQPGGSLKLSCAASGFTFNK |
| | | | YAMNWVRQAPGKGLEWVARIRSKYNNYATYYADSVKDRFTISRDDSK |
| | | | NTAYLQMNNLKTEDTAVYYCVRHGNFGNSYISYWAYWGQGTLVTVSS |
| | | | GGGGSGGGGSGGGGSQTVVTQEPSLTVSPGGTVTLTCGSSTGAVTSG |
| | | | NYPNWVQQKPGQAPRGLIGGTKFLAPGTPARFSGSLLGGKAALTLSG |
| | | | VQPEDEAEYYCVLWYSNRWVFGGGTKLTVL |
| 252. | C19_1xCD3- | Bispecific | DIQMTQSPSSLSASVGDRVTITCQASETIYSSLAWYQQKPGKPPKLL |
| | scFc | HLE | IYGASNLESGVPSRFSGSGSGTDFTFTISSLQPEDIATYYCQSGVYS |
| | | molecule | AGLTFGGGTKVEIKGGGGSGGGGSGGGGSEVQLLESGGGLVQPGGSL |
| | | | RLSCAASGFTFSSYGVSWVRQAPGKGLEWIGYNDPVFGSIYYASWVK |
| | | | GRFTISSDNSKNTLYLQMNSLRAEDTAVYYCAKDRSYVSSSGYHFNL |
| | | | WGQGTLVTVSSGGGGSEVQLVESGGGLVQPGGSLKLSCAASGFTFNK |
| | | | YAMNWVRQAPGKGLEWVARIRSKYNNYATYYADSVKDRFTISRDDSK |
| | | | NTAYLQMNNLKTEDTAVYYCVRHGNFGNSYISYWAYWGQGTLVTVSS |
| | | | GGGGSGGGGSGGGGSQTVVTQEPSLTVSPGGTVTLTCGSSTGAVTSG |
| | | | NYPNWVQQKPGQAPRGLIGGTKFLAPGTPARFSGSLLGGKAALTLSG |
| | | | VQPEDEAEYYCVLWYSNRWVFGGGTKLTVLGGGGDKTHTCPPCPAPE |
| | | | LLGGPSVFLFPPKPKDTLMISRTPEVTCVVVDVSHEDPEVKFNWYVD |
| | | | GVEVHNAKTKPCEEQYGSTYRCVSVLTVLHQDWLNGKEYKCKVSNKA |
| | | | LPAPIEKTISKAKGQPREPQVYTLPPSREEMTKNQVSLTCLVKGFYP |
| | | | SDIAVEWESNGQPENNYKTTPPVLDSDGSFFLYSKLTVDKSRWQQGN |
| | | | VFSCSVMHEALHNHYTQKSLSLSPGKGGGGSGGGGSGGGGSGGGGSG |
| | | | GGGSGGGGSDKTHTCPPCPAPELLGGPSVFLFPPKPKDTLMISRTPE |
| | | | VTCVVVDVSHEDPEVKFNWYVDGVEVHNAKTKPCEEQYGSTYRCVSV |
| | | | LTVLHQDWLNGKEYKCKVSNKALPAPIEKTISKAKGQPREPQVYTLP |
| | | | PSREEMTKNQVSLTCLVKGFYPSDIAVEWESNGQPENNYKTTPPVLD |
| | | | SDGSFFLYSKLTVDKSRWQQGNVFSCSVMHEALHNHYTQKSLSLSPG |
| | | | K |
| 253. | C19_1_CCxCD3- | VH | EVQLLESGGGLVQPGGSLRLSCAASGFTFSSYGVSWVRQAPGKCLEW |
| | scFc | | IGYNDPVFGSIYYASWVKGRFTISSDNSKNTLYLQMNSLRAEDTAVY |
| | | | YCAKDRSYVSSSGYHFNLWGQGTLVTVSS |
| 254. | C19_1_CCxCD3- | VL | DIQMTQSPSSLSASVGDRVTITCQASETIYSSLAWYQQKPGKPPKLL |
| | scFc | | IYGASNLESGVPSRFSGSGSGTDFTFTISSLQPEDIATYYCQSGVYS |
| | | | AGLTFGCGTKVEIK |
| 255. | C19_1_CCxCD3- | scFv | DIQMTQSPSSLSASVGDRVTITCQASETIYSSLAWYQQKPGKPPKLL |
| | scFc | | IYGASNLESGVPSRFSGSGSGTDFTFTISSLQPEDIATYYCQSGVYS |
| | | | AGLTFGCGTKVEIKGGGGSGGGGSGGGGSEVQLLESGGGLVQPGGSL |
| | | | RLSCAASGFTFSSYGVSWVRQAPGKCLEWIGYNDPVFGSIYYASWVK |
| | | | GRFTISSDNSKNTLYLQMNSLRAEDTAVYYCAKDRSYVSSSGYHFNL |
| | | | WGQGTLVTVSS |
| 256. | C19_1_CCxCD3- | bispecific | DIQMTQSPSSLSASVGDRVTITCQASETIYSSLAWYQQKPGKPPKLL |
| | scFc | molecule | IYGASNLESGVPSRFSGSGSGTDFTFTISSLQPEDIATYYCQSGVYS |
| | | | AGLTFGCGTKVEIKGGGGSGGGGSGGGGSEVQLLESGGGLVQPGGSL |
| | | | RLSCAASGFTFSSYGVSWVRQAPGKCLEWIGYNDPVFGSIYYASWVK |
| | | | GRFTISSDNSKNTLYLQMNSLRAEDTAVYYCAKDRSYVSSSGYHFNL |
| | | | WGQGTLVTVSSGGGGSEVQLVESGGGLVQPGGSLKLSCAASGFTFNK |
| | | | YAMNWVRQAPGKGLEWVARIRSKYNNYATYYADSVKDRFTISRDDSK |
| | | | NTAYLQMNNLKTEDTAVYYCVRHGNFGNSYISYWAYWGQGTLVTVSS |
| | | | GGGGSGGGGSGGGGSQTVVTQEPSLTVSPGGTVTLTCGSSTGAVTSG |
| | | | NYPNWVQQKPGQAPRGLIGGTKFLAPGTPARFSGSLLGGKAALTLSG |
| | | | VQPEDEAEYYCVLWYSNRWVFGGGTKLTVL |
| 257. | C19_1_CCxCD3- | bispecific | DIQMTQSPSSLSASVGDRVTITCQASETIYSSLAWYQQKPGKPPKLL |
| | scFc | molecule | IYGASNLESGVPSRFSGSGSGTDFTFTISSLQPEDIATYYCQSGVYS |
| | | | AGLTFGCGTKVEIKGGGGSGGGGSGGGGSEVQLLESGGGLVQPGGSL |
| | | | RLSCAASGFTFSSYGVSWVRQAPGKCLEWIGYNDPVFGSIYYASWVK |
| | | | GRFTISSDNSKNTLYLQMNSLRAEDTAVYYCAKDRSYVSSSGYHFNL |
| | | | WGQGTLVTVSSGGGGSEVQLVESGGGLVQPGGSLKLSCAASGFTFNK |
| | | | YAMNWVRQAPGKGLEWVARIRSKYNNYATYYADSVKDRFTISRDDSK |
| | | | NTAYLQMNNLKTEDTAVYYCVRHGNFGNSYISYWAYWGQGTLVTVSS |
| | | | GGGGSGGGGSGGGGSQTVVTQEPSLTVSPGGTVTLTCGSSTGAVTSG |
| | | | NYPNWVQQKPGQAPRGLIGGTKFLAPGTPARFSGSLLGGKAALTLSG |
| | | | VQPEDEAEYYCVLWYSNRWVFGGGTKLTVLGGGGDKTHTCPPCPAPE |
| | | | LLGGPSVFLFPPKPKDTLMISRTPEVTCVVVDVSHEDPEVKFNWYVD |
| | | | GVEVHNAKTKPCEEQYGSTYRCVSVLTVLHQDWLNGKEYKCKVSNKA |
| | | | LPAPIEKTISKAKGQPREPQVYTLPPSREEMTKNQVSLTCLVKGFYP |
| | | | SDIAVEWESNGQPENNYKTTPPVLDSDGSFFLYSKLTVDKSRWQQGN |
| | | | VFSCSVMHEALHNHYTQKSLSLSPGKGGGGSGGGGSGGGGSGGGGSG |
| | | | GGGSGGGGSDKTHTCPPCPAPELLGGPSVFLFPPKPKDTLMISRTPE |
| | | | VTCVVVDVSHEDPEVKFNWYVDGVEVHNAKTKPCEEQYGSTYRCVSV |
| | | | LTVLHQDWLNGKEYKCKVSNKALPAPIEKTISKAKGQPREPQVYTLP |
| | | | PSREEMTKNQVSLTCLVKGFYPSDIAVEWESNGQPENNYKTTPPVLD |
| | | | SDGSFFLYSKLTVDKSRWQQGNVFSCSVMHEALHNHYTQKSLSLSPG |
| | | | K |
| 258. | C19_2xCD3- | VH CDR1 | SYGVS |
| | scFc | | |
| 259. | C19_2xCD3- | VH CDR2 | YNDPVFGSIYYASWVKG |
| | scFc | | |
| 260. | C19_2xCD3- | VH CDR3 | DRSYVSSSGYHFNL |
| | scFc | | |
| 261. | C19_2xCD3- | VL CDR1 | QASETIYSSLA |
| | scFc | | |
| 262. | C19_2xCD3- | VL CDR2 | GASNLES |
| | scFc | | |
| 263. | C19_2xCD3- | VL CDR3 | QSGVYSAGLT |
| | scFc | | |
| 264. | C19_2xCD3- | VH | EVQLLESGGGLVQPGGSLRLSCAASGFTFSSYGVSWVRQAPGKGLEW |
| | scFc | | IGYNDPVFGSIYYASWVKGRFTISSDNSKNTLYLQMNSLRAEDTAVY |
| | | | YCAKDRSYVSSSGYHFNLWGQGTLVTVSS |
| 265. | C19_2xCD3- | VL | DIQMTQSPSSLSASVGDRVTITCQASETIYSSLAWYQQKPGKAPKLL |
| | scFc | | IYGASNLESGVPSRFSGSGSGTDFTFTISSMQPEDIATYYCQSGVYS |
| | | | AGLTFGGGTKVEIK |
| 266. | C19_2xCD3- | scFv | DIQMTQSPSSLSASVGDRVTITCQASETIYSSLAWYQQKPGKAPKLL |
| | scFc | | IYGASNLESGVPSRFSGSGSGTDFTFTISSMQPEDIATYYCQSGVYS |
| | | | AGLTFGGGTKVEIKGGGGSGGGGSGGGGSEVQLLESGGGLVQPGGSL |
| | | | RLSCAASGFTFSSYGVSWVRQAPGKGLEWIGYNDPVFGSIYYASWVK |
| | | | GRFTISSDNSKNTLYLQMNSLRAEDTAVYYCAKDRSYVSSSGYHFNL |
| | | | WGQGTLVTVSS |
| 267. | C19_2xCD3- | Bispecfic | DIQMTQSPSSLSASVGDRVTITCQASETIYSSLAWYQQKPGKAPKLL |
| | scFc | molecule | IYGASNLESGVPSRFSGSGSGTDFTFTISSMQPEDIATYYCQSGVYS |
| | | | AGLTFGGGTKVEIKGGGGSGGGGSGGGGSEVQLLESGGGLVQPGGSL |
| | | | RLSCAASGFTFSSYGVSWVRQAPGKGLEWIGYNDPVFGSIYYASWVK |
| | | | GRFTISSDNSKNTLYLQMNSLRAEDTAVYYCAKDRSYVSSSGYHFNL |
| | | | WGQGTLVTVSSGGGGSEVQLVESGGGLVQPGGSLKLSCAASGFTFNK |
| | | | YAMNWVRQAPGKGLEWVARIRSKYNNYATYYADSVKDRFTISRDDSK |
| | | | NTAYLQMNNLKTEDTAVYYCVRHGNFGNSYISYWAYWGQGTLVTVSS |
| | | | GGGGSGGGGSGGGGSQTVVTQEPSLTVSPGGTVTLTCGSSTGAVTSG |
| | | | NYPNWVQQKPGQAPRGLIGGTKFLAPGTPARFSGSLLGGKAALTLSG |
| | | | VQPEDEAEYYCVLWYSNRWVFGGGTKLTVL |
| 268. | C19_2xCD3- | Bispecfic | DIQMTQSPSSLSASVGDRVTITCQASETIYSSLAWYQQKPGKAPKLL |
| | scFc | HLE | IYGASNLESGVPSRFSGSGSGTDFTFTISSMQPEDIATYYCQSGVYS |
| | | molecule | AGLTFGGGTKVEIKGGGGSGGGGSGGGGSEVQLLESGGGLVQPGGSL |
| | | | RLSCAASGFTFSSYGVSWVRQAPGKGLEWIGYNDPVFGSIYYASWVK |
| | | | GRFTISSDNSKNTLYLQMNSLRAEDTAVYYCAKDRSYVSSSGYHFNL |
| | | | WGQGTLVTVSSGGGGSEVQLVESGGGLVQPGGSLKLSCAASGFTFNK |
| | | | YAMNWVRQAPGKGLEWVARIRSKYNNYATYYADSVKDRFTISRDDSK |
| | | | NTAYLQMNNLKTEDTAVYYCVRHGNFGNSYISYWAYWGQGTLVTVSS |
| | | | GGGGSGGGGSGGGGSQTVVTQEPSLTVSPGGTVTLTCGSSTGAVTSG |
| | | | NYPNWVQQKPGQAPRGLIGGTKFLAPGTPARFSGSLLGGKAALTLSG |
| | | | VQPEDEAEYYCVLWYSNRWVFGGGTKLTVLGGGGDKTHTCPPCPAPE |
| | | | LLGGPSVFLFPPKPKDTLMISRTPEVTCVVVDVSHEDPEVKFNWYVD |
| | | | GVEVHNAKTKPCEEQYGSTYRCVSVLTVLHQDWLNGKEYKCKVSNKA |
| | | | LPAPIEKTISKAKGQPREPQVYTLPPSREEMTKNQVSLTCLVKGFYP |
| | | | SDIAVEWESNGQPENNYKTTPPVLDSDGSFFLYSKLTVDKSRWQQGN |
| | | | VFSCSVMHEALHNHYTQKSLSLSPGKGGGGSGGGGSGGGGSGGGGSG |
| | | | GGGSGGGGSDKTHTCPPCPAPELLGGPSVFLFPPKPKDTLMISRTPE |
| | | | VTCVVVDVSHEDPEVKFNWYVDGVEVHNAKTKPCEEQYGSTYRCVSV |
| | | | LTVLHQDWLNGKEYKCKVSNKALPAPIEKTISKAKGQPREPQVYTLP |
| | | | PSREEMTKNQVSLTCLVKGFYPSDIAVEWESNGQPENNYKTTPPVLD |
| | | | SDGSFFLYSKLTVDKSRWQQGNVFSCSVMHEALHNHYTQKSLSLSPG |
| | | | K |
| 269. | C19_2_CCxC | VH | EVQLLESGGGLVQPGGSLRLSCAASGFTFSSYGVSWVRQAPGKCLEW |
| | D3-scFc | | IGYNDPVFGSIYYASWVKGRFTISSDNSKNTLYLQMNSLRAEDTAVY |
| | | | YCAKDRSYVSSSGYHFNLWGQGTLVTVSS |
| 270. | C19_2_CCxC | VL | DIQMTQSPSSLSASVGDRVTITCQASETIYSSLAWYQQKPGKAPKLL |
| | D3-scFc | | IYGASNLESGVPSRFSGSGSGTDFTFTISSMQPEDIATYYCQSGVYS |
| | | | AGLTFGCGTKVEIK |
| 271. | C19_2_CCxC | scFv | DIQMTQSPSSLSASVGDRVTITCQASETIYSSLAWYQQKPGKAPKLL |
| | D3-scFc | | IYGASNLESGVPSRFSGSGSGTDFTFTISSMQPEDIATYYCQSGVYS |
| | | | AGLTFGCGTKVEIKGGGGSGGGGSGGGGSEVQLLESGGGLVQPGGSL |
| | | | RLSCAASGFTFSSYGVSWVRQAPGKCLEWIGYNDPVFGSIYYASWVK |
| | | | GRFTISSDNSKNTLYLQMNSLRAEDTAVYYCAKDRSYVSSSGYHFNL |
| | | | WGQGTLVTVSS |
| 272. | C19_2_CCxC | bispecfic | DIQMTQSPSSLSASVGDRVTITCQASETIYSSLAWYQQKPGKAPKLL |
| | D3-scFc | molecule | IYGASNLESGVPSRFSGSGSGTDFTFTISSMQPEDIATYYCQSGVYS |
| | | | AGLTFGCGTKVEIKGGGGSGGGGSGGGGSEVQLLESGGGLVQPGGSL |
| | | | RLSCAASGFTFSSYGVSWVRQAPGKCLEWIGYNDPVFGSIYYASWVK |
| | | | GRFTISSDNSKNTLYLQMNSLRAEDTAVYYCAKDRSYVSSSGYHFNL |
| | | | WGQGTLVTVSSGGGGSEVQLVESGGGLVQPGGSLKLSCAASGFTFNK |
| | | | YAMNWVRQAPGKGLEWVARIRSKYNNYATYYADSVKDRFTISRDDSK |
| | | | NTAYLQMNNLKTEDTAVYYCVRHGNFGNSYISYWAYWGQGTLVTVSS |
| | | | GGGGSGGGGSGGGGSQTVVTQEPSLTVSPGGTVTLTCGSSTGAVTSG |
| | | | NYPNWVQQKPGQAPRGLIGGTKFLAPGTPARFSGSLLGGKAALTLSG |
| | | | VQPEDEAEYYCVLWYSNRWVFGGGTKLTVL |
| 273. | C19_2_CCxC | bispecific | DIQMTQSPSSLSASVGDRVTITCQASETIYSSLAWYQQKPGKAPKLL |
| | D3-scFc | molecule | IYGASNLESGVPSRFSGSGSGTDFTFTISSMQPEDIATYYCQSGVYS |
| | | | AGLTFGCGTKVEIKGGGGSGGGGSGGGGSEVQLLESGGGLVQPGGSL |
| | | | RLSCAASGFTFSSYGVSWVRQAPGKCLEWIGYNDPVFGSIYYASWVK |
| | | | GRFTISSDNSKNTLYLQMNSLRAEDTAVYYCAKDRSYVSSSGYHFNL |
| | | | WGQGTLVTVSSGGGGSEVQLVESGGGLVQPGGSLKLSCAASGFTFNK |
| | | | YAMNWVRQAPGKGLEWVARIRSKYNNYATYYADSVKDRFTISRDDSK |
| | | | NTAYLQMNNLKTEDTAVYYCVRHGNFGNSYISYWAYWGQGTLVTVSS |
| | | | GGGGSGGGGSGGGGSQTVVTQEPSLTVSPGGTVTLTCGSSTGAVTSG |
| | | | NYPNWVQQKPGQAPRGLIGGTKFLAPGTPARFSGSLLGGKAALTLSG |
| | | | VQPEDEAEYYCVLWYSNRWVFGGGTKLTVLGGGGDKTHTCPPCPAPE |
| | | | LLGGPSVFLFPPKPKDTLMISRTPEVTCVVVDVSHEDPEVKFNWYVD |
| | | | GVEVHNAKTKPCEEQYGSTYRCVSVLTVLHQDWLNGKEYKCKVSNKA |
| | | | LPAPIEKTISKAKGQPREPQVYTLPPSREEMTKNQVSLTCLVKGFYP |
| | | | SDIAVEWESNGQPENNYKTTPPVLDSDGSFFLYSKLTVDKSRWQQGN |
| | | | VFSCSVMHEALHNHYTQKSLSLSPGKGGGGSGGGGSGGGGSGGGGSG |
| | | | GGGSGGGGSDKTHTCPPCPAPELLGGPSVFLFPPKPKDTLMISRTPE |
| | | | VTCVVVDVSHEDPEVKFNWYVDGVEVHNAKTKPCEEQYGSTYRCVSV |
| | | | LTVLHQDWLNGKEYKCKVSNKALPAPIEKTISKAKGQPREPQVYTLP |
| | | | PSREEMTKNQVSLTCLVKGFYPSDIAVEWESNGQPENNYKTTPPVLD |
| | | | SDGSFFLYSKLTVDKSRWQQGNVFSCSVMHEALHNHYTQKSLSLSPG |
| | | | K |
| 274. | C19_3xCD3- | VH CDR1 | SYGVS |
| | scFc | | |
| 275. | C19_3xCD3- | VH CDR2 | YNDPVFGSIYYASWVKG |
| | scFc | | |
| 276. | C19_3xCD3- | VH CDR3 | DRSYVSSSGYHFNL |
| | scFc | | |
| 277. | C19_3xCD3- | VL CDR1 | QASETIYSSLA |
| | scFc | | |
| 278. | C19_3xCD3- | VL CDR2 | GASNLES |
| | scFc | | |
| 279. | C19_3xCD3- | VL CDR3 | QSGVYSAGLT |
| | scFc | | |
| 280. | C19_3xCD3- | VH | EVQLLESGGGLVQPGGSLRLSCAASGFTFSSYGVSWVRQAPGKGLEW |
| | scFc | | IGYNDPVFGSIYYASWVKGRFTISSDNSKNTLYLQMNSLRAEDTAVY |
| | | | YCAKDRSYVSSSGYHFNLWGQGTLVTVSS |
| 281. | C19_3xCD3- | VL | DIQMTQSPSSLSASVGDRVTITCQASETIYSSLAWYQQKPGKAPKLL |
| | scFc | | IYGASNLESGVPSRFSGSGSGTDFTFTISGLQPEDIATYYCQSGVYS |
| | | | AGLTFGGGTKVEIK |
| 282. | C19_3xCD3- | scFv | DIQMTQSPSSLSASVGDRVTITCQASETIYSSLAWYQQKPGKAPKLL |
| | scFc | | IYGASNLESGVPSRFSGSGSGTDFTFTISGLQPEDIATYYCQSGVYS |
| | | | AGLTFGGGTKVEIKGGGGSGGGGSGGGGSEVQLLESGGGLVQPGGSL |
| | | | RLSCAASGFTFSSYGVSWVRQAPGKGLEWIGYNDPVFGSIYYASWVK |
| | | | GRFTISSDNSKNTLYLQMNSLRAEDTAVYYCAKDRSYVSSSGYHFNL |
| | | | WGQGTLVTVSS |
| 283. | C19_3xCD3- | bispecific | DIQMTQSPSSLSASVGDRVTITCQASETIYSSLAWYQQKPGKAPKLL |
| | scFc | molecule | IYGASNLESGVPSRFSGSGSGTDFTFTISGLQPEDIATYYCQSGVYS |
| | | | AGLTFGGGTKVEIKGGGGSGGGGSGGGGSEVQLLESGGGLVQPGGSL |
| | | | RLSCAASGFTFSSYGVSWVRQAPGKGLEWIGYNDPVFGSIYYASWVK |
| | | | GRFTISSDNSKNTLYLQMNSLRAEDTAVYYCAKDRSYVSSSGYHFNL |
| | | | WGQGTLVTVSSGGGGSEVQLVESGGGLVQPGGSLKLSCAASGFTFNK |
| | | | YAMNWVRQAPGKGLEWVARIRSKYNNYATYYADSVKDRFTISRDDSK |
| | | | NTAYLQMNNLKTEDTAVYYCVRHGNFGNSYISYWAYWGQGTLVTVSS |
| | | | GGGGSGGGGSGGGGSQTVVTQEPSLTVSPGGTVTLTCGSSTGAVTSG |
| | | | NYPNWVQQKPGQAPRGLIGGTKFLAPGTPARFSGSLLGGKAALTLSG |
| | | | VQPEDEAEYYCVLWYSNRWVFGGGTKLTVL |
| 284. | C19_3xCD3- | bispecific | DIQMTQSPSSLSASVGDRVTITCQASETIYSSLAWYQQKPGKAPKLL |
| | scFc | molecule | IYGASNLESGVPSRFSGSGSGTDFTFTISGLQPEDIATYYCQSGVYS |
| | | | AGLTFGGGTKVEIKGGGGSGGGGSGGGGSEVQLLESGGGLVQPGGSL |
| | | | RLSCAASGFTFSSYGVSWVRQAPGKGLEWIGYNDPVFGSIYYASWVK |
| | | | GRFTISSDNSKNTLYLQMNSLRAEDTAVYYCAKDRSYVSSSGYHFNL |
| | | | WGQGTLVTVSSGGGGSEVQLVESGGGLVQPGGSLKLSCAASGFTFNK |
| | | | YAMNWVRQAPGKGLEWVARIRSKYNNYATYYADSVKDRFTISRDDSK |
| | | | NTAYLQMNNLKTEDTAVYYCVRHGNFGNSYISYWAYWGQGTLVTVSS |
| | | | GGGGSGGGGSGGGGSQTVVTQEPSLTVSPGGTVTLTCGSSTGAVTSG |
| | | | NYPNWVQQKPGQAPRGLIGGTKFLAPGTPARFSGSLLGGKAALTLSG |
| | | | VQPEDEAEYYCVLWYSNRWVFGGGTKLTVLGGGGDKTHTCPPCPAPE |
| | | | LLGGPSVFLFPPKPKDTLMISRTPEVTCVVVDVSHEDPEVKFNWYVD |
| | | | GVEVHNAKTKPCEEQYGSTYRCVSVLTVLHQDWLNGKEYKCKVSNKA |
| | | | LPAPIEKTISKAKGQPREPQVYTLPPSREEMTKNQVSLTCLVKGFYP |
| | | | SDIAVEWESNGQPENNYKTTPPVLDSDGSFFLYSKLTVDKSRWQQGN |
| | | | VFSCSVMHEALHNHYTQKSLSLSPGKGGGGSGGGGSGGGGSGGGGSG |
| | | | GGGSGGGGSDKTHTCPPCPAPELLGGPSVFLFPPKPKDTLMISRTPE |
| | | | VTCVVVDVSHEDPEVKFNWYVDGVEVHNAKTKPCEEQYGSTYRCVSV |
| | | | LTVLHQDWLNGKEYKCKVSNKALPAPIEKTISKAKGQPREPQVYTLP |
| | | | PSREEMTKNQVSLTCLVKGFYPSDIAVEWESNGQPENNYKTTPPVLD |
| | | | SDGSFFLYSKLTVDKSRWQQGNVFSCSVMHEALHNHYTQKSLSLSPG |
| | | | K |
| 285. | C19_3_CCxC | VH | EVQLLESGGGLVQPGGSLRLSCAASGFTFSSYGVSWVRQAPGKCLEW |
| | D3-scFc | | IGYNDPVFGSIYYASWVKGRFTISSDNSKNTLYLQMNSLRAEDTAVY |
| | | | YCAKDRSYVSSSGYHFNLWGQGTLVTVSS |
| 286. | C19_3_CCxC | VL | DIQMTQSPSSLSASVGDRVTITCQASETIYSSLAWYQQKPGKAPKLL |
| | D3-scFc | | IYGASNLESGVPSRFSGSGSGTDFTFTISGLQPEDIATYYCQSGVYS |
| | | | AGLTFGCGTKVEIK |
| 287. | C19_3_CCxC | scFv | DIQMTQSPSSLSASVGDRVTITCQASETIYSSLAWYQQKPGKAPKLL |
| | D3-scFc | | IYGASNLESGVPSRFSGSGSGTDFTFTISGLQPEDIATYYCQSGVYS |
| | | | AGLTFGCGTKVEIKGGGGSGGGGSGGGGSEVQLLESGGGLVQPGGSL |
| | | | RLSCAASGFTFSSYGVSWVRQAPGKCLEWIGYNDPVFGSIYYASWVK |
| | | | GRFTISSDNSKNTLYLQMNSLRAEDTAVYYCAKDRSYVSSSGYHFNL |
| | | | WGQGTLVTVSS |
| 288. | C19_3_CCxC | Bispecific | DIQMTQSPSSLSASVGDRVTITCQASETIYSSLAWYQQKPGKAPKLL |
| | D3-scFc | molecule | IYGASNLESGVPSRFSGSGSGTDFTFTISGLQPEDIATYYCQSGVYS |
| | | | AGLTFGCGTKVEIKGGGGSGGGGSGGGGSEVQLLESGGGLVQPGGSL |
| | | | RLSCAASGFTFSSYGVSWVRQAPGKCLEWIGYNDPVFGSIYYASWVK |
| | | | GRFTISSDNSKNTLYLQMNSLRAEDTAVYYCAKDRSYVSSSGYHFNL |
| | | | WGQGTLVTVSSGGGGSEVQLVESGGGLVQPGGSLKLSCAASGFTFNK |
| | | | YAMNWVRQAPGKGLEWVARIRSKYNNYATYYADSVKDRFTISRDDSK |
| | | | NTAYLQMNNLKTEDTAVYYCVRHGNFGNSYISYWAYWGQGTLVTVSS |
| | | | GGGGSGGGGSGGGGSQTVVTQEPSLTVSPGGTVTLTCGSSTGAVTSG |
| | | | NYPNWVQQKPGQAPRGLIGGTKFLAPGTPARFSGSLLGGKAALTLSG |
| | | | VQPEDEAEYYCVLWYSNRWVFGGGTKLTVL |
| 289. | C193CCxC | Bispecific | DIQMTQSPSSLSASVGDRVTITCQASETIYSSLAWYQQKPGKAPKLL |
| | D3-scFc | HLE | IYGASNLESGVPSRFSGSGSGTDFTFTISGLQPEDIATYYCQSGVYS |
| | | molecule | AGLTFGCGTKVEIKGGGGSGGGGSGGGGSEVQLLESGGGLVQPGGSL |
| | | | RLSCAASGFTFSSYGVSWVRQAPGKCLEWIGYNDPVFGSIYYASWVK |
| | | | GRFTISSDNSKNTLYLQMNSLRAEDTAVYYCAKDRSYVSSSGYHFNL |
| | | | WGQGTLVTVSSGGGGSEVQLVESGGGLVQPGGSLKLSCAASGFTFNK |
| | | | YAMNWVRQAPGKGLEWVARIRSKYNNYATYYADSVKDRFTISRDDSK |
| | | | NTAYLQMNNLKTEDTAVYYCVRHGNFGNSYISYWAYWGQGTLVTVSS |
| | | | GGGGSGGGGSGGGGSQTVVTQEPSLTVSPGGTVTLTCGSSTGAVTSG |
| | | | NYPNWVQQKPGQAPRGLIGGTKFLAPGTPARFSGSLLGGKAALTLSG |
| | | | VQPEDEAEYYCVLWYSNRWVFGGGTKLTVLGGGGDKTHTCPPCPAPE |
| | | | LLGGPSVFLFPPKPKDTLMISRTPEVTCVVVDVSHEDPEVKFNWYVD |
| | | | GVEVHNAKTKPCEEQYGSTYRCVSVLTVLHQDWLNGKEYKCKVSNKA |
| | | | LPAPIEKTISKAKGQPREPQVYTLPPSREEMTKNQVSLTCLVKGFYP |
| | | | SDIAVEWESNGQPENNYKTTPPVLDSDGSFFLYSKLTVDKSRWQQGN |
| | | | VFSCSVMHEALHNHYTQKSLSLSPGKGGGGSGGGGSGGGGSGGGGSG |
| | | | GGGSGGGGSDKTHTCPPCPAPELLGGPSVFLFPPKPKDTLMISRTPE |
| | | | VTCVVVDVSHEDPEVKFNWYVDGVEVHNAKTKPCEEQYGSTYRCVSV |
| | | | LTVLHQDWLNGKEYKCKVSNKALPAPIEKTISKAKGQPREPQVYTLP |
| | | | PSREEMTKNQVSLTCLVKGFYPSDIAVEWESNGQPENNYKTTPPVLD |
| | | | SDGSFFLYSKLTVDKSRWQQGNVFSCSVMHEALHNHYTQKSLSLSPG |
| | | | K |
| 290. | C19_4xCD3- | VH CDR1 | SYGVS |
| | scFc | | |
| 291. | C19_4xCD3- | VH CDR2 | YNDPVFGSIYYASWVKG |
| | scFc | | |
| 292. | C19_4xCD3- | VH CDR3 | DRSYVSSSGYHFNL |
| | scFc | | |
| 293. | C19_4xCD3- | VL CDR1 | QASETIYSSLA |
| | scFc | | |
| 294. | C19_4xCD3- | VL CDR2 | GASNLES |
| | scFc | | |
| 295. | C19_4xCD3- | VL CDR3 | QSGVYSAGLT |
| | scFc | | |
| 296. | C19_4xCD3- | VH | EVQLLESGGGLVQPGGSLRLSCAASGFTFSSYGVSWVRQAPGKGLEW |
| | scFc | | VGYNDPVFGSIYYASWVKGRFTISSDNSKNTLYLQMNSLRAEDTAVY |
| | | | YCAKDRSYVSSSGYHFNLWGQGTLVTVSS |
| 297. | C19_4xCD3- | VL | DIQMTQSPSSLSASVGDRVTITCQASETIYSSLAWYQQKPGKAPKLL |
| | scFc | | IYGASNLESGVPSRFSGSGSGTDFTFTISSLQPEDIATYYCQSGVYS |
| | | | AGLTFGGGTKVEIK |
| 298. | C19_4xCD3- | scFv | DIQMTQSPSSLSASVGDRVTITCQASETIYSSLAWYQQKPGKAPKLL |
| | scFc | | IYGASNLESGVPSRFSGSGSGTDFTFTISSLQPEDIATYYCQSGVYS |
| | | | AGLTFGGGTKVEIKGGGGSGGGGSGGGGSEVQLLESGGGLVQPGGSL |
| | | | RLSCAASGFTFSSYGVSWVRQAPGKGLEWVGYNDPVFGSIYYASWVK |
| | | | GRFTISSDNSKNTLYLQMNSLRAEDTAVYYCAKDRSYVSSSGYHFNL |
| | | | WGQGTLVTVSS |
| 299. | C19_4xCD3- | Bispecfic | DIQMTQSPSSLSASVGDRVTITCQASETIYSSLAWYQQKPGKAPKLL |
| | scFc | molecule | IYGASNLESGVPSRFSGSGSGTDFTFTISSLQPEDIATYYCQSGVYS |
| | | | AGLTFGGGTKVEIKGGGGSGGGGSGGGGSEVQLLESGGGLVQPGGSL |
| | | | RLSCAASGFTFSSYGVSWVRQAPGKGLEWVGYNDPVFGSIYYASWVK |
| | | | GRFTISSDNSKNTLYLQMNSLRAEDTAVYYCAKDRSYVSSSGYHFNL |
| | | | WGQGTLVTVSSGGGGSEVQLVESGGGLVQPGGSLKLSCAASGFTFNK |
| | | | YAMNWVRQAPGKGLEWVARIRSKYNNYATYYADSVKDRFTISRDDSK |
| | | | NTAYLQMNNLKTEDTAVYYCVRHGNFGNSYISYWAYWGQGTLVTVSS |
| | | | GGGGSGGGGSGGGGSQTVVTQEPSLTVSPGGTVTLTCGSSTGAVTSG |
| | | | NYPNWVQQKPGQAPRGLIGGTKFLAPGTPARFSGSLLGGKAALTLSG |
| | | | VQPEDEAEYYCVLWYSNRWVFGGGTKLTVL |
| 300. | C19_4xCD3- | Bispecific | DIQMTQSPSSLSASVGDRVTITCQASETIYSSLAWYQQKPGKAPKLL |
| | scFc | HLE | IYGASNLESGVPSRFSGSGSGTDFTFTISSLQPEDIATYYCQSGVYS |
| | | molecule | AGLTFGGGTKVEIKGGGGSGGGGSGGGGSEVQLLESGGGLVQPGGSL |
| | | | RLSCAASGFTFSSYGVSWVRQAPGKGLEWVGYNDPVFGSIYYASWVK |
| | | | GRFTISSDNSKNTLYLQMNSLRAEDTAVYYCAKDRSYVSSSGYHFNL |
| | | | WGQGTLVTVSSGGGGSEVQLVESGGGLVQPGGSLKLSCAASGFTFNK |
| | | | YAMNWVRQAPGKGLEWVARIRSKYNNYATYYADSVKDRFTISRDDSK |
| | | | NTAYLQMNNLKTEDTAVYYCVRHGNFGNSYISYWAYWGQGTLVTVSS |
| | | | GGGGSGGGGSGGGGSQTVVTQEPSLTVSPGGTVTLTCGSSTGAVTSG |
| | | | NYPNWVQQKPGQAPRGLIGGTKFLAPGTPARFSGSLLGGKAALTLSG |
| | | | VQPEDEAEYYCVLWYSNRWVFGGGTKLTVLGGGGDKTHTCPPCPAPE |
| | | | LLGGPSVFLFPPKPKDTLMISRTPEVTCVVVDVSHEDPEVKFNWYVD |
| | | | GVEVHNAKTKPCEEQYGSTYRCVSVLTVLHQDWLNGKEYKCKVSNKA |
| | | | LPAPIEKTISKAKGQPREPQVYTLPPSREEMTKNQVSLTCLVKGFYP |
| | | | SDIAVEWESNGQPENNYKTTPPVLDSDGSFFLYSKLTVDKSRWQQGN |
| | | | VFSCSVMHEALHNHYTQKSLSLSPGKGGGGSGGGGSGGGGSGGGGSG |
| | | | GGGSGGGGSDKTHTCPPCPAPELLGGPSVFLFPPKPKDTLMISRTPE |
| | | | VTCVVVDVSHEDPEVKFNWYVDGVEVHNAKTKPCEEQYGSTYRCVSV |
| | | | LTVLHQDWLNGKEYKCKVSNKALPAPIEKTISKAKGQPREPQVYTLP |
| | | | PSREEMTKNQVSLTCLVKGFYPSDIAVEWESNGQPENNYKTTPPVLD |
| | | | SDGSFFLYSKLTVDKSRWQQGNVFSCSVMHEALHNHYTQKSLSLSPG |
| | | | K |
| 301. | C19_4_CCxC | VH | EVQLLESGGGLVQPGGSLRLSCAASGFTFSSYGVSWVRQAPGKCLEW |
| | D3-scFc | | VGYNDPVFGSIYYASWVKGRFTISSDNSKNTLYLQMNSLRAEDTAVY |
| | | | YCAKDRSYVSSSGYHFNLWGQGTLVTVSS |
| 302. | C19_4_CCxC | VL | DIQMTQSPSSLSASVGDRVTITCQASETIYSSLAWYQQKPGKAPKLL |
| | D3-scFc | | IYGASNLESGVPSRFSGSGSGTDFTFTISSLQPEDIATYYCQSGVYS |
| | | | AGLTFGCGTKVEIK |
| 303. | C19_4_CCxC | scFv | DIQMTQSPSSLSASVGDRVTITCQASETIYSSLAWYQQKPGKAPKLL |
| | D3-scFc | | IYGASNLESGVPSRFSGSGSGTDFTFTISSLQPEDIATYYCQSGVYS |
| | | | AGLTFGCGTKVEIKGGGGSGGGGSGGGGSEVQLLESGGGLVQPGGSL |
| | | | RLSCAASGFTFSSYGVSWVRQAPGKCLEWVGYNDPVFGSIYYASWVK |
| | | | GRFTISSDNSKNTLYLQMNSLRAEDTAVYYCAKDRSYVSSSGYHFNL |
| | | | WGQGTLVTVSS |
| 304. | C19_4_CCxC | Bispecific | DIQMTQSPSSLSASVGDRVTITCQASETIYSSLAWYQQKPGKAPKLL |
| | D3-scFc | molecule | IYGASNLESGVPSRFSGSGSGTDFTFTISSLQPEDIATYYCQSGVYS |
| | | | AGLTFGCGTKVEIKGGGGSGGGGSGGGGSEVQLLESGGGLVQPGGSL |
| | | | RLSCAASGFTFSSYGVSWVRQAPGKCLEWVGYNDPVFGSIYYASWVK |
| | | | GRFTISSDNSKNTLYLQMNSLRAEDTAVYYCAKDRSYVSSSGYHFNL |
| | | | WGQGTLVTVSSGGGGSEVQLVESGGGLVQPGGSLKLSCAASGFTFNK |
| | | | YAMNWVRQAPGKGLEWVARIRSKYNNYATYYADSVKDRFTISRDDSK |
| | | | NTAYLQMNNLKTEDTAVYYCVRHGNFGNSYISYWAYWGQGTLVTVSS |
| | | | GGGGSGGGGSGGGGSQTVVTQEPSLTVSPGGTVTLTCGSSTGAVTSG |
| | | | NYPNWVQQKPGQAPRGLIGGTKFLAPGTPARFSGSLLGGKAALTLSG |
| | | | VQPEDEAEYYCVLWYSNRWVFGGGTKLTVL |
| 305. | C19_4_CCxC | Bispecific | DIQMTQSPSSLSASVGDRVTITCQASETIYSSLAWYQQKPGKAPKLL |
| | D3-scFc | HLE | IYGASNLESGVPSRFSGSGSGTDFTFTISSLQPEDIATYYCQSGVYS |
| | | molecule | AGLTFGCGTKVEIKGGGGSGGGGSGGGGSEVQLLESGGGLVQPGGSL |
| | | | RLSCAASGFTFSSYGVSWVRQAPGKCLEWVGYNDPVFGSIYYASWVK |
| | | | GRFTISSDNSKNTLYLQMNSLRAEDTAVYYCAKDRSYVSSSGYHFNL |
| | | | WGQGTLVTVSSGGGGSEVQLVESGGGLVQPGGSLKLSCAASGFTFNK |
| | | | YAMNWVRQAPGKGLEWVARIRSKYNNYATYYADSVKDRFTISRDDSK |
| | | | NTAYLQMNNLKTEDTAVYYCVRHGNFGNSYISYWAYWGQGTLVTVSS |
| | | | GGGGSGGGGSGGGGSQTVVTQEPSLTVSPGGTVTLTCGSSTGAVTSG |
| | | | NYPNWVQQKPGQAPRGLIGGTKFLAPGTPARFSGSLLGGKAALTLSG |
| | | | VQPEDEAEYYCVLWYSNRWVFGGGTKLTVLGGGGDKTHTCPPCPAPE |
| | | | LLGGPSVFLFPPKPKDTLMISRTPEVTCVVVDVSHEDPEVKFNWYVD |
| | | | GVEVHNAKTKPCEEQYGSTYRCVSVLTVLHQDWLNGKEYKCKVSNKA |
| | | | LPAPIEKTISKAKGQPREPQVYTLPPSREEMTKNQVSLTCLVKGFYP |
| | | | SDIAVEWESNGQPENNYKTTPPVLDSDGSFFLYSKLTVDKSRWQQGN |
| | | | VFSCSVMHEALHNHYTQKSLSLSPGKGGGGSGGGGSGGGGSGGGGSG |
| | | | GGGSGGGGSDKTHTCPPCPAPELLGGPSVFLFPPKPKDTLMISRTPE |
| | | | VTCVVVDVSHEDPEVKFNWYVDGVEVHNAKTKPCEEQYGSTYRCVSV |
| | | | LTVLHQDWLNGKEYKCKVSNKALPAPIEKTISKAKGQPREPQVYTLP |
| | | | PSREEMTKNQVSLTCLVKGFYPSDIAVEWESNGQPENNYKTTPPVLD |
| | | | SDGSFFLYSKLTVDKSRWQQGNVFSCSVMHEALHNHYTQKSLSLSPG |
| | | | K |
| 306. | C19_1xCD3- | Bispecific | DIQMTQSPSSLSASVGDRVTITCQASETIYSSLAWYQQKPGKPPKLL |
| | scFc_delGK | HLE | IYGASNLESGVPSRFSGSGSGTDFTFTISSLQPEDIATYYCQSGVYS |
| | | molecule | AGLTFGGGTKVEIKGGGGSGGGGSGGGGSEVQLLESGGGLVQPGGSL |
| | | | RLSCAASGFTFSSYGVSWVRQAPGKGLEWIGYNDPVFGSIYYASWVK |
| | | | GRFTISSDNSKNTLYLQMNSLRAEDTAVYYCAKDRSYVSSSGYHFNL |
| | | | WGQGTLVTVSSGGGGSEVQLVESGGGLVQPGGSLKLSCAASGFTFNK |
| | | | YAMNWVRQAPGKGLEWVARIRSKYNNYATYYADSVKDRFTISRDDSK |
| | | | NTAYLQMNNLKTEDTAVYYCVRHGNFGNSYISYWAYWGQGTLVTVSS |
| | | | GGGGSGGGGSGGGGSQTVVTQEPSLTVSPGGTVTLTCGSSTGAVTSG |
| | | | NYPNWVQQKPGQAPRGLIGGTKFLAPGTPARFSGSLLGGKAALTLSG |
| | | | VQPEDEAEYYCVLWYSNRWVFGGGTKLTVLGGGGDKTHTCPPCPAPE |
| | | | LLGGPSVFLFPPKPKDTLMISRTPEVTCVVVDVSHEDPEVKFNWYVD |
| | | | GVEVHNAKTKPCEEQYGSTYRCVSVLTVLHQDWLNGKEYKCKVSNKA |
| | | | LPAPIEKTISKAKGQPREPQVYTLPPSREEMTKNQVSLTCLVKGFYP |
| | | | SDIAVEWESNGQPENNYKTTPPVLDSDGSFFLYSKLTVDKSRWQQGN |
| | | | VFSCSVMHEALHNHYTQKSLSLSPGGGGSGGGGSGGGGSGGGGSGGG |
| | | | GSGGGGSDKTHTCPPCPAPELLGGPSVFLFPPKPKDTLMISRTPEVT |
| | | | CVVVDVSHEDPEVKFNWYVDGVEVHNAKTKPCEEQYGSTYRCVSVLT |
| | | | VLHQDWLNGKEYKCKVSNKALPAPIEKTISKAKGQPREPQVYTLPPS |
| | | | REEMTKNQVSLTCLVKGFYPSDIAVEWESNGQPENNYKTTPPVLDSD |
| | | | GSFFLYSKLTVDKSRWQQGNVFSCSVMHEALHNHYTQKSLSLSPGK |
| 307. | C19_1_CCxC | Bispecific | DIQMTQSPSSLSASVGDRVTITCQASETIYSSLAWYQQKPGKPPKLL |
| | D3- | HLE | IYGASNLESGVPSRFSGSGSGTDFTFTISSLQPEDIATYYCQSGVYS |
| | scFc_delGK | molecule | AGLTFGCGTKVEIKGGGGSGGGGSGGGGSEVQLLESGGGLVQPGGSL |
| | | | RLSCAASGFTFSSYGVSWVRQAPGKCLEWIGYNDPVFGSIYYASWVK |
| | | | GRFTISSDNSKNTLYLQMNSLRAEDTAVYYCAKDRSYVSSSGYHFNL |
| | | | WGQGTLVTVSSGGGGSEVQLVESGGGLVQPGGSLKLSCAASGFTFNK |
| | | | YAMNWVRQAPGKGLEWVARIRSKYNNYATYYADSVKDRFTISRDDSK |
| | | | NTAYLQMNNLKTEDTAVYYCVRHGNFGNSYISYWAYWGQGTLVTVSS |
| | | | GGGGSGGGGSGGGGSQTVVTQEPSLTVSPGGTVTLTCGSSTGAVTSG |
| | | | NYPNWVQQKPGQAPRGLIGGTKFLAPGTPARFSGSLLGGKAALTLSG |
| | | | VQPEDEAEYYCVLWYSNRWVFGGGTKLTVLGGGGDKTHTCPPCPAPE |
| | | | LLGGPSVFLFPPKPKDTLMISRTPEVTCVVVDVSHEDPEVKFNWYVD |
| | | | GVEVHNAKTKPCEEQYGSTYRCVSVLTVLHQDWLNGKEYKCKVSNKA |
| | | | LPAPIEKTISKAKGQPREPQVYTLPPSREEMTKNQVSLTCLVKGFYP |
| | | | SDIAVEWESNGQPENNYKTTPPVLDSDGSFFLYSKLTVDKSRWQQGN |
| | | | VFSCSVMHEALHNHYTQKSLSLSPGGGGSGGGGSGGGGSGGGGSGGG |
| | | | GSGGGGSDKTHTCPPCPAPELLGGPSVFLFPPKPKDTLMISRTPEVT |
| | | | CVVVDVSHEDPEVKFNWYVDGVEVHNAKTKPCEEQYGSTYRCVSVLT |
| | | | VLHQDWLNGKEYKCKVSNKALPAPIEKTISKAKGQPREPQVYTLPPS |
| | | | REEMTKNQVSLTCLVKGFYPSDIAVEWESNGQPENNYKTTPPVLDSD |
| | | | GSFFLYSKLTVDKSRWQQGNVFSCSVMHEALHNHYTQKSLSLSPGK |
| 308. | C19_2xCD3- | Bispecific | DIQMTQSPSSLSASVGDRVTITCQASETIYSSLAWYQQKPGKAPKLL |
| | scFc_delGK | HLE | IYGASNLESGVPSRFSGSGSGTDFTFTISSMQPEDIATYYCQSGVYS |
| | | molecule | AGLTFGGGTKVEIKGGGGSGGGGSGGGGSEVQLLESGGGLVQPGGSL |
| | | | RLSCAASGFTFSSYGVSWVRQAPGKGLEWIGYNDPVFGSIYYASWVK |
| | | | GRFTISSDNSKNTLYLQMNSLRAEDTAVYYCAKDRSYVSSSGYHFNL |
| | | | WGQGTLVTVSSGGGGSEVQLVESGGGLVQPGGSLKLSCAASGFTFNK |
| | | | YAMNWVRQAPGKGLEWVARIRSKYNNYATYYADSVKDRFTISRDDSK |
| | | | NTAYLQMNNLKTEDTAVYYCVRHGNFGNSYISYWAYWGQGTLVTVSS |
| | | | GGGGSGGGGSGGGGSQTVVTQEPSLTVSPGGTVTLTCGSSTGAVTSG |
| | | | NYPNWVQQKPGQAPRGLIGGTKFLAPGTPARFSGSLLGGKAALTLSG |
| | | | VQPEDEAEYYCVLWYSNRWVFGGGTKLTVLGGGGDKTHTCPPCPAPE |
| | | | LLGGPSVFLFPPKPKDTLMISRTPEVTCVVVDVSHEDPEVKFNWYVD |
| | | | GVEVHNAKTKPCEEQYGSTYRCVSVLTVLHQDWLNGKEYKCKVSNKA |
| | | | LPAPIEKTISKAKGQPREPQVYTLPPSREEMTKNQVSLTCLVKGFYP |
| | | | SDIAVEWESNGQPENNYKTTPPVLDSDGSFFLYSKLTVDKSRWQQGN |
| | | | VFSCSVMHEALHNHYTQKSLSLSPGGGGSGGGGSGGGGSGGGGSGGG |
| | | | GSGGGGSDKTHTCPPCPAPELLGGPSVFLFPPKPKDTLMISRTPEVT |
| | | | CVVVDVSHEDPEVKFNWYVDGVEVHNAKTKPCEEQYGSTYRCVSVLT |
| | | | VLHQDWLNGKEYKCKVSNKALPAPIEKTISKAKGQPREPQVYTLPPS |
| | | | REEMTKNQVSLTCLVKGFYPSDIAVEWESNGQPENNYKTTPPVLDSD |
| | | | GSFFLYSKLTVDKSRWQQGNVFSCSVMHEALHNHYTQKSLSLSPGK |
| 309. | C19_2_CCxC | Bispecific | DIQMTQSPSSLSASVGDRVTITCQASETIYSSLAWYQQKPGKAPKLL |
| | D3- | HLE | IYGASNLESGVPSRFSGSGSGTDFTFTISSMQPEDIATYYCQSGVYS |
| | scFc_delGK | molecule | AGLTFGCGTKVEIKGGGGSGGGGSGGGGSEVQLLESGGGLVQPGGSL |
| | | | RLSCAASGFTFSSYGVSWVRQAPGKCLEWIGYNDPVFGSIYYASWVK |
| | | | GRFTISSDNSKNTLYLQMNSLRAEDTAVYYCAKDRSYVSSSGYHFNL |
| | | | WGQGTLVTVSSGGGGSEVQLVESGGGLVQPGGSLKLSCAASGFTFNK |
| | | | YAMNWVRQAPGKGLEWVARIRSKYNNYATYYADSVKDRFTISRDDSK |
| | | | NTAYLQMNNLKTEDTAVYYCVRHGNFGNSYISYWAYWGQGTLVTVSS |
| | | | GGGGSGGGGSGGGGSQTVVTQEPSLTVSPGGTVTLTCGSSTGAVTSG |
| | | | NYPNWVQQKPGQAPRGLIGGTKFLAPGTPARFSGSLLGGKAALTLSG |
| | | | VQPEDEAEYYCVLWYSNRWVFGGGTKLTVLGGGGDKTHTCPPCPAPE |
| | | | LLGGPSVFLFPPKPKDTLMISRTPEVTCVVVDVSHEDPEVKFNWYVD |
| | | | GVEVHNAKTKPCEEQYGSTYRCVSVLTVLHQDWLNGKEYKCKVSNKA |
| | | | LPAPIEKTISKAKGQPREPQVYTLPPSREEMTKNQVSLTCLVKGFYP |
| | | | SDIAVEWESNGQPENNYKTTPPVLDSDGSFFLYSKLTVDKSRWQQGN |
| | | | VFSCSVMHEALHNHYTQKSLSLSPGGGGSGGGGSGGGGSGGGGSGGG |
| | | | GSGGGGSDKTHTCPPCPAPELLGGPSVFLFPPKPKDTLMISRTPEVT |
| | | | CVVVDVSHEDPEVKFNWYVDGVEVHNAKTKPCEEQYGSTYRCVSVLT |
| | | | VLHQDWLNGKEYKCKVSNKALPAPIEKTISKAKGQPREPQVYTLPPS |
| | | | REEMTKNQVSLTCLVKGFYPSDIAVEWESNGQPENNYKTTPPVLDSD |
| | | | GSFFLYSKLTVDKSRWQQGNVFSCSVMHEALHNHYTQKSLSLSPGK |
| 310. | C19_3xCD3- | Bispecific | DIQMTQSPSSLSASVGDRVTITCQASETIYSSLAWYQQKPGKAPKLL |
| | scFc_delGK | HLE | IYGASNLESGVPSRFSGSGSGTDFTFTISGLQPEDIATYYCQSGVYS |
| | | molecule | AGLTFGGGTKVEIKGGGGSGGGGSGGGGSEVQLLESGGGLVQPGGSL |
| | | | RLSCAASGFTFSSYGVSWVRQAPGKGLEWIGYNDPVFGSIYYASWVK |
| | | | GRFTISSDNSKNTLYLQMNSLRAEDTAVYYCAKDRSYVSSSGYHFNL |
| | | | WGQGTLVTVSSGGGGSEVQLVESGGGLVQPGGSLKLSCAASGFTFNK |
| | | | YAMNWVRQAPGKGLEWVARIRSKYNNYATYYADSVKDRFTISRDDSK |
| | | | NTAYLQMNNLKTEDTAVYYCVRHGNFGNSYISYWAYWGQGTLVTVSS |
| | | | GGGGSGGGGSGGGGSQTVVTQEPSLTVSPGGTVTLTCGSSTGAVTSG |
| | | | NYPNWVQQKPGQAPRGLIGGTKFLAPGTPARFSGSLLGGKAALTLSG |
| | | | VQPEDEAEYYCVLWYSNRWVFGGGTKLTVLGGGGDKTHTCPPCPAPE |
| | | | LLGGPSVFLFPPKPKDTLMISRTPEVTCVVVDVSHEDPEVKFNWYVD |
| | | | GVEVHNAKTKPCEEQYGSTYRCVSVLTVLHQDWLNGKEYKCKVSNKA |
| | | | LPAPIEKTISKAKGQPREPQVYTLPPSREEMTKNQVSLTCLVKGFYP |
| | | | SDIAVEWESNGQPENNYKTTPPVLDSDGSFFLYSKLTVDKSRWQQGN |
| | | | VFSCSVMHEALHNHYTQKSLSLSPGGGGSGGGGSGGGGSGGGGSGGG |
| | | | GSGGGGSDKTHTCPPCPAPELLGGPSVFLFPPKPKDTLMISRTPEVT |
| | | | CVVVDVSHEDPEVKFNWYVDGVEVHNAKTKPCEEQYGSTYRCVSVLT |
| | | | VLHQDWLNGKEYKCKVSNKALPAPIEKTISKAKGQPREPQVYTLPPS |
| | | | REEMTKNQVSLTCLVKGFYPSDIAVEWESNGQPENNYKTTPPVLDSD |
| | | | GSFFLYSKLTVDKSRWQQGNVFSCSVMHEALHNHYTQKSLSLSPGK |
| 311. | C19_3_CCxC | Bispecific | DIQMTQSPSSLSASVGDRVTITCQASETIYSSLAWYQQKPGKAPKLL |
| | D3- | HLE | IYGASNLESGVPSRFSGSGSGTDFTFTISGLQPEDIATYYCQSGVYS |
| | scFc_delGK | molecule | AGLTFGCGTKVEIKGGGGSGGGGSGGGGSEVQLLESGGGLVQPGGSL |
| | | | RLSCAASGFTFSSYGVSWVRQAPGKCLEWIGYNDPVFGSIYYASWVK |
| | | | GRFTISSDNSKNTLYLQMNSLRAEDTAVYYCAKDRSYVSSSGYHFNL |
| | | | WGQGTLVTVSSGGGGSEVQLVESGGGLVQPGGSLKLSCAASGFTFNK |
| | | | YAMNWVRQAPGKGLEWVARIRSKYNNYATYYADSVKDRFTISRDDSK |
| | | | NTAYLQMNNLKTEDTAVYYCVRHGNFGNSYISYWAYWGQGTLVTVSS |
| | | | GGGGSGGGGSGGGGSQTVVTQEPSLTVSPGGTVTLTCGSSTGAVTSG |
| | | | NYPNWVQQKPGQAPRGLIGGTKFLAPGTPARFSGSLLGGKAALTLSG |
| | | | VQPEDEAEYYCVLWYSNRWVFGGGTKLTVLGGGGDKTHTCPPCPAPE |
| | | | LLGGPSVFLFPPKPKDTLMISRTPEVTCVVVDVSHEDPEVKFNWYVD |
| | | | GVEVHNAKTKPCEEQYGSTYRCVSVLTVLHQDWLNGKEYKCKVSNKA |
| | | | LPAPIEKTISKAKGQPREPQVYTLPPSREEMTKNQVSLTCLVKGFYP |
| | | | SDIAVEWESNGQPENNYKTTPPVLDSDGSFFLYSKLTVDKSRWQQGN |
| | | | VFSCSVMHEALHNHYTQKSLSLSPGGGGSGGGGSGGGGSGGGGSGGG |
| | | | GSGGGGSDKTHTCPPCPAPELLGGPSVFLFPPKPKDTLMISRTPEVT |
| | | | CVVVDVSHEDPEVKFNWYVDGVEVHNAKTKPCEEQYGSTYRCVSVLT |
| | | | VLHQDWLNGKEYKCKVSNKALPAPIEKTISKAKGQPREPQVYTLPPS |
| | | | REEMTKNQVSLTCLVKGFYPSDIAVEWESNGQPENNYKTTPPVLDSD |
| | | | GSFFLYSKLTVDKSRWQQGNVFSCSVMHEALHNHYTQKSLSLSPGK |
| 312. | C19_4xCD3- | Bispecific | DIQMTQSPSSLSASVGDRVTITCQASETIYSSLAWYQQKPGKAPKLL |
| | scFc_delGK | HLE | IYGASNLESGVPSRFSGSGSGTDFTFTISSLQPEDIATYYCQSGVYS |
| | | molecule | AGLTFGGGTKVEIKGGGGSGGGGSGGGGSEVQLLESGGGLVQPGGSL |
| | | | RLSCAASGFTFSSYGVSWVRQAPGKGLEWVGYNDPVFGSIYYASWVK |
| | | | GRFTISSDNSKNTLYLQMNSLRAEDTAVYYCAKDRSYVSSSGYHFNL |
| | | | WGQGTLVTVSSGGGGSEVQLVESGGGLVQPGGSLKLSCAASGFTFNK |
| | | | YAMNWVRQAPGKGLEWVARIRSKYNNYATYYADSVKDRFTISRDDSK |
| | | | NTAYLQMNNLKTEDTAVYYCVRHGNFGNSYISYWAYWGQGTLVTVSS |
| | | | GGGGSGGGGSGGGGSQTVVTQEPSLTVSPGGTVTLTCGSSTGAVTSG |
| | | | NYPNWVQQKPGQAPRGLIGGTKFLAPGTPARFSGSLLGGKAALTLSG |
| | | | VQPEDEAEYYCVLWYSNRWVFGGGTKLTVLGGGGDKTHTCPPCPAPE |
| | | | LLGGPSVFLFPPKPKDTLMISRTPEVTCVVVDVSHEDPEVKFNWYVD |
| | | | GVEVHNAKTKPCEEQYGSTYRCVSVLTVLHQDWLNGKEYKCKVSNKA |
| | | | LPAPIEKTISKAKGQPREPQVYTLPPSREEMTKNQVSLTCLVKGFYP |
| | | | SDIAVEWESNGQPENNYKTTPPVLDSDGSFFLYSKLTVDKSRWQQGN |
| | | | VFSCSVMHEALHNHYTQKSLSLSPGGGGSGGGGSGGGGSGGGGSGGG |
| | | | GSGGGGSDKTHTCPPCPAPELLGGPSVFLFPPKPKDTLMISRTPEVT |
| | | | CVVVDVSHEDPEVKFNWYVDGVEVHNAKTKPCEEQYGSTYRCVSVLT |
| | | | VLHQDWLNGKEYKCKVSNKALPAPIEKTISKAKGQPREPQVYTLPPS |
| | | | REEMTKNQVSLTCLVKGFYPSDIAVEWESNGQPENNYKTTPPVLDSD |
| | | | GSFFLYSKLTVDKSRWQQGNVFSCSVMHEALHNHYTQKSLSLSPGK |
| 313. | C19_4_CCxC | Bispecific | DIQMTQSPSSLSASVGDRVTITCQASETIYSSLAWYQQKPGKAPKLL |
| | D3- | HLE | IYGASNLESGVPSRFSGSGSGTDFTFTISSLQPEDIATYYCQSGVYS |
| | scFc_delGK | molecule | AGLTFGCGTKVEIKGGGGSGGGGSGGGGSEVQLLESGGGLVQPGGSL |
| | | | RLSCAASGFTFSSYGVSWVRQAPGKCLEWVGYNDPVFGSIYYASWVK |
| | | | GRFTISSDNSKNTLYLQMNSLRAEDTAVYYCAKDRSYVSSSGYHFNL |
| | | | WGQGTLVTVSSGGGGSEVQLVESGGGLVQPGGSLKLSCAASGFTFNK |
| | | | YAMNWVRQAPGKGLEWVARIRSKYNNYATYYADSVKDRFTISRDDSK |
| | | | NTAYLQMNNLKTEDTAVYYCVRHGNFGNSYISYWAYWGQGTLVTVSS |
| | | | GGGGSGGGGSGGGGSQTVVTQEPSLTVSPGGTVTLTCGSSTGAVTSG |
| | | | NYPNWVQQKPGQAPRGLIGGTKFLAPGTPARFSGSLLGGKAALTLSG |
| | | | VQPEDEAEYYCVLWYSNRWVFGGGTKLTVLGGGGDKTHTCPPCPAPE |
| | | | LLGGPSVFLFPPKPKDTLMISRTPEVTCVVVDVSHEDPEVKFNWYVD |
| | | | GVEVHNAKTKPCEEQYGSTYRCVSVLTVLHQDWLNGKEYKCKVSNKA |
| | | | LPAPIEKTISKAKGQPREPQVYTLPPSREEMTKNQVSLTCLVKGFYP |
| | | | SDIAVEWESNGQPENNYKTTPPVLDSDGSFFLYSKLTVDKSRWQQGN |
| | | | VFSCSVMHEALHNHYTQKSLSLSPGGGGSGGGGSGGGGSGGGGSGGG |
| | | | GSGGGGSDKTHTCPPCPAPELLGGPSVFLFPPKPKDTLMISRTPEVT |
| | | | CVVVDVSHEDPEVKFNWYVDGVEVHNAKTKPCEEQYGSTYRCVSVLT |
| | | | VLHQDWLNGKEYKCKVSNKALPAPIEKTISKAKGQPREPQVYTLPPS |
| | | | REEMTKNQVSLTCLVKGFYPSDIAVEWESNGQPENNYKTTPPVLDSD |
| | | | GSFFLYSKLTVDKSRWQQGNVFSCSVMHEALHNHYTQKSLSLSPGK |
| 314. | FL_1xCD3- | VH CDR1 | NARMGVS |
| | scFc | | |
| 315. | FL_1xCD3- | VH CDR2 | NIFSNDEKSYSTSLKS |
| | scFc | | |
| 316. | FL_1xCD3- | VH CDR3 | IVGYGSGWYGYFDY |
| | scFc | | |
| 317. | FL_1xCD3- | VL CDR1 | RASQGIRNDLG |
| | scFc | | |
| 318. | FL_1xCD3- | VL CDR2 | AASSLQS |
| | scFc | | |
| 319. | FL_1xCD3- | VL CDR3 | LQHNSYPLT |
| | scFc | | |
| 320. | FL_1xCD3- | VH | QVTLKESGPALVKPTETLTLTCTVSGFSLSNARMGVSWIRQPPGKAL |
| | scFc | | EWLANIFSNDEKSYSTSLKSRLTISKGTSKSQVVLTMTNMDPEDTAT |
| | | | YYCARIVGYGSGWYGYFDYWGQGTLVTVSS |
| 321. | FL_1xCD3- | VL | DIQMTQSPSSLSASVGDRVTITCRASQGIRNDLGWYQQKPGKAPQRL |
| | scFc | | IYAASSLQSGVPSRFSGSGSGTEFTLTISSLQPEDFATYYCLQHNSY |
| | | | PLTFGGGTKVEIKS |
| 322. | FL_1xCD3- | scFv | QVTLKESGPALVKPTETLTLTCTVSGFSLSNARMGVSWIRQPPGKAL |
| | cFc | | EWLANIFSNDEKSYSTSLKSRLTISKGTSKSQVVLTMTNMDPEDTAT |
| | | | YYCARIVGYGSGWYGYFDYWGQGTLVTVSSGGGGSGGGGSGGGGSDI |
| | | | QMTQSPSSLSASVGDRVTITCRASQGIRNDLGWYQQKPGKAPQRLIY |
| | | | AASSLQSGVPSRFSGSGSGTEFTLTISSLQPEDFATYYCLQHNSYPL |
| | | | TFGGGTKVEIK |
| 323. | FL_1xCD3- | Bispecific | QVTLKESGPALVKPTETLTLTCTVSGFSLSNARMGVSWIRQPPGKAL |
| | scFc | molecule | EWLANIFSNDEKSYSTSLKSRLTISKGTSKSQVVLTMTNMDPEDTAT |
| | | | YYCARIVGYGSGWYGYFDYWGQGTLVTVSSGGGGSGGGGSGGGGSDI |
| | | | QMTQSPSSLSASVGDRVTITCRASQGIRNDLGWYQQKPGKAPQRLIY |
| | | | AASSLQSGVPSRFSGSGSGTEFTLTISSLQPEDFATYYCLQHNSYPL |
| | | | TFGGGTKVEIKSGGGGSEVQLVESGGGLVQPGGSLKLSCAASGFTFN |
| | | | KYAMNWVRQAPGKGLEWVARIRSKYNNYATYYADSVKDRFTISRDDS |
| | | | KNTAYLQMNNLKTEDTAVYYCVRHGNFGNSYISYWAYWGQGTLVTVS |
| | | | SGGGGSGGGGSGGGGSQTVVTQEPSLTVSPGGTVTLTCGSSTGAVTS |
| | | | GNYPNWVQQKPGQAPRGLIGGTKFLAPGTPARFSGSLLGGKAALTLS |
| | | | GVQPEDEAEYYCVLWYSNRWVFGGGTKLTVL |
| 324. | FL_1xCD3- | Bispecific | QVTLKESGPALVKPTETLTLTCTVSGFSLSNARMGVSWIRQPPGKAL |
| | scFc | HLE | EWLANIFSNDEKSYSTSLKSRLTISKGTSKSQVVLTMTNMDPEDTAT |
| | | molecule | YYCARIVGYGSGWYGYFDYWGQGTLVTVSSGGGGSGGGGSGGGGSDI |
| | | | QMTQSPSSLSASVGDRVTITCRASQGIRNDLGWYQQKPGKAPQRLIY |
| | | | AASSLQSGVPSRFSGSGSGTEFTLTISSLQPEDFATYYCLQHNSYPL |
| | | | TFGGGTKVEIKSGGGGSEVQLVESGGGLVQPGGSLKLSCAASGFTFN |
| | | | KYAMNWVRQAPGKGLEWVARIRSKYNNYATYYADSVKDRFTISRDDS |
| | | | KNTAYLQMNNLKTEDTAVYYCVRHGNFGNSYISYWAYWGQGTLVTVS |
| | | | SGGGGSGGGGSGGGGSQTVVTQEPSLTVSPGGTVTLTCGSSTGAVTS |
| | | | GNYPNWVQQKPGQAPRGLIGGTKFLAPGTPARFSGSLLGGKAALTLS |
| | | | GVQPEDEAEYYCVLWYSNRWVFGGGTKLTVLGGGGDKTHTCPPCPAP |
| | | | ELLGGPSVFLFPPKPKDTLMISRTPEVTCVVVDVSHEDPEVKFNWYV |
| | | | DGVEVHNAKTKPCEEQYGSTYRCVSVLTVLHQDWLNGKEYKCKVSNK |
| | | | ALPAPIEKTISKAKGQPREPQVYTLPPSREEMTKNQVSLTCLVKGFY |
| | | | PSDIAVEWESNGQPENNYKTTPPVLDSDGSFFLYSKLTVDKSRWQQG |
| | | | NVFSCSVMHEALHNHYTQKSLSLSPGKGGGGSGGGGSGGGGSGGGGS |
| | | | GGGGSGGGGSDKTHTCPPCPAPELLGGPSVFLFPPKPKDTLMISRTP |
| | | | EVTCVVVDVSHEDPEVKFNWYVDGVEVHNAKTKPCEEQYGSTYRCVS |
| | | | VLTVLHQDWLNGKEYKCKVSNKALPAPIEKTISKAKGQPREPQVYTL |
| | | | PPSREEMTKNQVSLTCLVKGFYPSDIAVEWESNGQPENNYKTTPPVL |
| | | | DSDGSFFLYSKLTVDKSRWQQGNVFSCSVMHEALHNHYTQKSLSLSP |
| | | | GK |
| 325. | FL_1_CCxCD | VH | QVTLKESGPALVKPTETLTLTCTVSGFSLSNARMGVSWIRQPPGKCL |
| | 3-scFc | | EWLANIFSNDEKSYSTSLKSRLTISKGTSKSQVVLTMTNMDPEDTAT |
| | | | YYCARIVGYGSGWYGYFDYWGQGTLVTVSS |
| 326. | FL_1_CCxCD | VL | DIQMTQSPSSLSASVGDRVTITCRASQGIRNDLGWYQQKPGKAPQRL |
| | 3-scFc | | IYAASSLQSGVPSRFSGSGSGTEFTLTISSLQPEDFATYYCLQHNSY |
| | | | PLTFGCGTKVEIK |
| 327. | FL_1_CCxCD | scFv | QVTLKESGPALVKPTETLTLTCTVSGFSLSNARMGVSWIRQPPGKCL |
| | 3-scFc | | EWLANIFSNDEKSYSTSLKSRLTISKGTSKSQVVLTMTNMDPEDTAT |
| | | | YYCARIVGYGSGWYGYFDYWGQGTLVTVSSGGGGSGGGGSGGGGSDI |
| | | | QMTQSPSSLSASVGDRVTITCRASQGIRNDLGWYQQKPGKAPQRLIY |
| | | | AASSLQSGVPSRFSGSGSGTEFTLTISSLQPEDFATYYCLQHNSYPL |
| | | | TFGCGTKVEIKS |
| 328. | FL_1_CCxCD | Bispecific | QVTLKESGPALVKPTETLTLTCTVSGFSLSNARMGVSWIRQPPGKCL |
| | 3-scFc | molecule | EWLANIFSNDEKSYSTSLKSRLTISKGTSKSQVVLTMTNMDPEDTAT |
| | | | YYCARIVGYGSGWYGYFDYWGQGTLVTVSSGGGGSGGGGSGGGGSDI |
| | | | QMTQSPSSLSASVGDRVTITCRASQGIRNDLGWYQQKPGKAPQRLIY |
| | | | AASSLQSGVPSRFSGSGSGTEFTLTISSLQPEDFATYYCLQHNSYPL |
| | | | TFGCGTKVEIKSGGGGSEVQLVESGGGLVQPGGSLKLSCAASGFTFN |
| | | | KYAMNWVRQAPGKGLEWVARIRSKYNNYATYYADSVKDRFTISRDDS |
| | | | KNTAYLQMNNLKTEDTAVYYCVRHGNFGNSYISYWAYWGQGTLVTVS |
| | | | SGGGGSGGGGSGGGGSQTVVTQEPSLTVSPGGTVTLTCGSSTGAVTS |
| | | | GNYPNWVQQKPGQAPRGLIGGTKFLAPGTPARFSGSLLGGKAALTLS |
| | | | GVQPEDEAEYYCVLWYSNRWVFGGGTKLTVL |
| 329. | FL_1_CCxCD | Bispecific | QVTLKESGPALVKPTETLTLTCTVSGFSLSNARMGVSWIRQPPGKCL |
| | 3-scFc | HLE | EWLANIFSNDEKSYSTSLKSRLTISKGTSKSQVVLTMTNMDPEDTAT |
| | | molecule | YYCARIVGYGSGWYGYFDYWGQGTLVTVSSGGGGSGGGGSGGGGSDI |
| | | | QMTQSPSSLSASVGDRVTITCRASQGIRNDLGWYQQKPGKAPQRLIY |
| | | | AASSLQSGVPSRFSGSGSGTEFTLTISSLQPEDFATYYCLQHNSYPL |
| | | | TFGCGTKVEIKSGGGGSEVQLVESGGGLVQPGGSLKLSCAASGFTFN |
| | | | KYAMNWVRQAPGKGLEWVARIRSKYNNYATYYADSVKDRFTISRDDS |
| | | | KNTAYLQMNNLKTEDTAVYYCVRHGNFGNSYISYWAYWGQGTLVTVS |
| | | | SGGGGSGGGGSGGGGSQTVVTQEPSLTVSPGGTVTLTCGSSTGAVTS |
| | | | GNYPNWVQQKPGQAPRGLIGGTKFLAPGTPARFSGSLLGGKAALTLS |
| | | | GVQPEDEAEYYCVLWYSNRWVFGGGTKLTVLGGGGDKTHTCPPCPAP |
| | | | ELLGGPSVFLFPPKPKDTLMISRTPEVTCVVVDVSHEDPEVKFNWYV |
| | | | DGVEVHNAKTKPCEEQYGSTYRCVSVLTVLHQDWLNGKEYKCKVSNK |
| | | | ALPAPIEKTISKAKGQPREPQVYTLPPSREEMTKNQVSLTCLVKGFY |
| | | | PSDIAVEWESNGQPENNYKTTPPVLDSDGSFFLYSKLTVDKSRWQQG |
| | | | NVFSCSVMHEALHNHYTQKSLSLSPGKGGGGSGGGGSGGGGSGGGGS |
| | | | GGGGSGGGGSDKTHTCPPCPAPELLGGPSVFLFPPKPKDTLMISRTP |
| | | | EVTCVVVDVSHEDPEVKFNWYVDGVEVHNAKTKPCEEQYGSTYRCVS |
| | | | VLTVLHQDWLNGKEYKCKVSNKALPAPIEKTISKAKGQPREPQVYTL |
| | | | PPSREEMTKNQVSLTCLVKGFYPSDIAVEWESNGQPENNYKTTPPVL |
| | | | DSDGSFFLYSKLTVDKSRWQQGNVFSCSVMHEALHNHYTQKSLSLSP |
| | | | GK |
| 330. | FL_2xCD3- | VH CDR1 | NARMGVS |
| | scFc | | |
| 331. | FL_2xCD3- | VH CDR2 | HIFSNDEKSYSTSLKN |
| | scFc | | |
| 332. | FL_2xCD3- | VH CDR3 | IVGYGSGWYGFFDY |
| | scFc | | |
| 333. | FL_2xCD3- | VL CDR1 | RASQGIRNDLG |
| | scFc | | |
| 334. | FL_2xCD3- | VL CDR2 | AASTLQS |
| | scFc | | |
| 335. | FL_2xCD3- | VL CDR3 | LQHNSYPLT |
| | scFc | | |
| 336. | FL_2xCD3- | VH | QVTLKESGPTLVKPTETLTLTCTLSGFSLNNARMGVSWIRQPPGKAL |
| | scFc | | EWLAHIFSNDEKSYSTSLKNRLTISKDSSKTQVVLTMTNVDPVDTAT |
| | | | YYCARIVGYGSGWYGFFDYWGQGTLVTVSS |
| 337. | FL_2xCD3- | VL | DIQMTQSPSSLSASVGDRVTITCRASQGIRNDLGWYQQKPGKAPKRL |
| | scFc | | IYAASTLQSGVPSRFSGSGSGTEFTLTISSLQPEDFATYYCLQHNSY |
| | | | PLTFGGGTKVEIK |
| 338. | FL_2xCD3- | scFv | QVTLKESGPTLVKPTETLTLTCTLSGFSLNNARMGVSWIRQPPGKAL |
| | scFc | | EWLAHIFSNDEKSYSTSLKNRLTISKDSSKTQVVLTMTNVDPVDTAT |
| | | | YYCARIVGYGSGWYGFFDYWGQGTLVTVSSGGGGSGGGGSGGGGSDI |
| | | | QMTQSPSSLSASVGDRVTITCRASQGIRNDLGWYQQKPGKAPKRLIY |
| | | | AASTLQSGVPSRFSGSGSGTEFTLTISSLQPEDFATYYCLQHNSYPL |
| | | | TFGGGTKVEIKS |
| 339. | FL_2xCD3- | Bispecific | QVTLKESGPTLVKPTETLTLTCTLSGFSLNNARMGVSWIRQPPGKAL |
| | scFc | molecule | EWLAHIFSNDEKSYSTSLKNRLTISKDSSKTQVVLTMTNVDPVDTAT |
| | | | YYCARIVGYGSGWYGFFDYWGQGTLVTVSSGGGGSGGGGSGGGGSDI |
| | | | QMTQSPSSLSASVGDRVTITCRASQGIRNDLGWYQQKPGKAPKRLIY |
| | | | AASTLQSGVPSRFSGSGSGTEFTLTISSLQPEDFATYYCLQHNSYPL |
| | | | TFGGGTKVEIKSGGGGSEVQLVESGGGLVQPGGSLKLSCAASGFTFN |
| | | | KYAMNWVRQAPGKGLEWVARIRSKYNNYATYYADSVKDRFTISRDDS |
| | | | KNTAYLQMNNLKTEDTAVYYCVRHGNFGNSYISYWAYWGQGTLVTVS |
| | | | SGGGGSGGGGSGGGGSQTVVTQEPSLTVSPGGTVTLTCGSSTGAVTS |
| | | | GNYPNWVQQKPGQAPRGLIGGTKFLAPGTPARFSGSLLGGKAALTLS |
| | | | GVQPEDEAEYYCVLWYSNRWVFGGGTKLTVL |
| 340. | FL_2xCD3- | Bispecific | QVTLKESGPTLVKPTETLTLTCTLSGFSLNNARMGVSWIRQPPGKAL |
| | scFc | HLE | EWLAHIFSNDEKSYSTSLKNRLTISKDSSKTQVVLTMTNVDPVDTAT |
| | | molecule | YYCARIVGYGSGWYGFFDYWGQGTLVTVSSGGGGSGGGGSGGGGSDI |
| | | | QMTQSPSSLSASVGDRVTITCRASQGIRNDLGWYQQKPGKAPKRLIY |
| | | | AASTLQSGVPSRFSGSGSGTEFTLTISSLQPEDFATYYCLQHNSYPL |
| | | | TFGGGTKVEIKSGGGGSEVQLVESGGGLVQPGGSLKLSCAASGFTFN |
| | | | KYAMNWVRQAPGKGLEWVARIRSKYNNYATYYADSVKDRFTISRDDS |
| | | | KNTAYLQMNNLKTEDTAVYYCVRHGNFGNSYISYWAYWGQGTLVTVS |
| | | | SGGGGSGGGGSGGGGSQTVVTQEPSLTVSPGGTVTLTCGSSTGAVTS |
| | | | GNYPNWVQQKPGQAPRGLIGGTKFLAPGTPARFSGSLLGGKAALTLS |
| | | | GVQPEDEAEYYCVLWYSNRWVFGGGTKLTVLGGGGDKTHTCPPCPAP |
| | | | ELLGGPSVFLFPPKPKDTLMISRTPEVTCVVVDVSHEDPEVKFNWYV |
| | | | DGVEVHNAKTKPCEEQYGSTYRCVSVLTVLHQDWLNGKEYKCKVSNK |
| | | | ALPAPIEKTISKAKGQPREPQVYTLPPSREEMTKNQVSLTCLVKGFY |
| | | | PSDIAVEWESNGQPENNYKTTPPVLDSDGSFFLYSKLTVDKSRWQQG |
| | | | NVFSCSVMHEALHNHYTQKSLSLSPGKGGGGSGGGGSGGGGSGGGGS |
| | | | GGGGSGGGGSDKTHTCPPCPAPELLGGPSVFLFPPKPKDTLMISRTP |
| | | | EVTCVVVDVSHEDPEVKFNWYVDGVEVHNAKTKPCEEQYGSTYRCVS |
| | | | VLTVLHQDWLNGKEYKCKVSNKALPAPIEKTISKAKGQPREPQVYTL |
| | | | PPSREEMTKNQVSLTCLVKGFYPSDIAVEWESNGQPENNYKTTPPVL |
| | | | DSDGSFFLYSKLTVDKSRWQQGNVFSCSVMHEALHNHYTQKSLSLSP |
| | | | GK |
| 341. | FL_2_CCxCD | VH | QVTLKESGPTLVKPTETLTLTCTLSGFSLNNARMGVSWIRQPPGKCL |
| | 3-scFc | | EWLAHIFSNDEKSYSTSLKNRLTISKDSSKTQVVLTMTNVDPVDTAT |
| | | | YYCARIVGYGSGWYGFFDYWGQGTLVTVSS |
| 342. | FL_2_CCxCD | VL | DIQMTQSPSSLSASVGDRVTITCRASQGIRNDLGWYQQKPGKAPKRL |
| | 3-scFc | | IYAASTLQSGVPSRFSGSGSGTEFTLTISSLQPEDFATYYCLQHNSY |
| | | | PLTFGCGTKVEIK |
| 343. | FL_2_CCxCD | scFv | QVTLKESGPTLVKPTETLTLTCTLSGFSLNNARMGVSWIRQPPGKCL |
| | 3-scFc | | EWLAHIFSNDEKSYSTSLKNRLTISKDSSKTQVVLTMTNVDPVDTAT |
| | | | YYCARIVGYGSGWYGFFDYWGQGTLVTVSSGGGGSGGGGSGGGGSDI |
| | | | QMTQSPSSLSASVGDRVTITCRASQGIRNDLGWYQQKPGKAPKRLIY |
| | | | AASTLQSGVPSRFSGSGSGTEFTLTISSLQPEDFATYYCLQHNSYPL |
| | | | TFGCGTKVEIKS |
| 344. | FL_2_CCxCD | Bispecific | QVTLKESGPTLVKPTETLTLTCTLSGFSLNNARMGVSWIRQPPGKCL |
| | 3-scFc | molecule | EWLAHIFSNDEKSYSTSLKNRLTISKDSSKTQVVLTMTNVDPVDTAT |
| | | | YYCARIVGYGSGWYGFFDYWGQGTLVTVSSGGGGSGGGGSGGGGSDI |
| | | | QMTQSPSSLSASVGDRVTITCRASQGIRNDLGWYQQKPGKAPKRLIY |
| | | | AASTLQSGVPSRFSGSGSGTEFTLTISSLQPEDFATYYCLQHNSYPL |
| | | | TFGCGTKVEIKSGGGGSEVQLVESGGGLVQPGGSLKLSCAASGFTFN |
| | | | KYAMNWVRQAPGKGLEWVARIRSKYNNYATYYADSVKDRFTISRDDS |
| | | | KNTAYLQMNNLKTEDTAVYYCVRHGNFGNSYISYWAYWGQGTLVTVS |
| | | | SGGGGSGGGGSGGGGSQTVVTQEPSLTVSPGGTVTLTCGSSTGAVTS |
| | | | GNYPNWVQQKPGQAPRGLIGGTKFLAPGTPARFSGSLLGGKAALTLS |
| | | | GVQPEDEAEYYCVLWYSNRWVFGGGTKLTVL |
| 345. | FL_2_CCxCD | Bispecific | QVTLKESGPTLVKPTETLTLTCTLSGFSLNNARMGVSWIRQPPGKCL |
| | 3-scFc | HLE | EWLAHIFSNDEKSYSTSLKNRLTISKDSSKTQVVLTMTNVDPVDTAT |
| | | molecule | YYCARIVGYGSGWYGFFDYWGQGTLVTVSSGGGGSGGGGSGGGGSDI |
| | | | QMTQSPSSLSASVGDRVTITCRASQGIRNDLGWYQQKPGKAPKRLIY |
| | | | AASTLQSGVPSRFSGSGSGTEFTLTISSLQPEDFATYYCLQHNSYPL |
| | | | TFGCGTKVEIKSGGGGSEVQLVESGGGLVQPGGSLKLSCAASGFTFN |
| | | | KYAMNWVRQAPGKGLEWVARIRSKYNNYATYYADSVKDRFTISRDDS |
| | | | KNTAYLQMNNLKTEDTAVYYCVRHGNFGNSYISYWAYWGQGTLVTVS |
| | | | SGGGGSGGGGSGGGGSQTVVTQEPSLTVSPGGTVTLTCGSSTGAVTS |
| | | | GNYPNWVQQKPGQAPRGLIGGTKFLAPGTPARFSGSLLGGKAALTLS |
| | | | GVQPEDEAEYYCVLWYSNRWVFGGGTKLTVLGGGGDKTHTCPPCPAP |
| | | | ELLGGPSVFLFPPKPKDTLMISRTPEVTCVVVDVSHEDPEVKFNWYV |
| | | | DGVEVHNAKTKPCEEQYGSTYRCVSVLTVLHQDWLNGKEYKCKVSNK |
| | | | ALPAPIEKTISKAKGQPREPQVYTLPPSREEMTKNQVSLTCLVKGFY |
| | | | PSDIAVEWESNGQPENNYKTTPPVLDSDGSFFLYSKLTVDKSRWQQG |
| | | | NVFSCSVMHEALHNHYTQKSLSLSPGKGGGGSGGGGSGGGGSGGGGS |
| | | | GGGGSGGGGSDKTHTCPPCPAPELLGGPSVFLFPPKPKDTLMISRTP |
| | | | EVTCVVVDVSHEDPEVKFNWYVDGVEVHNAKTKPCEEQYGSTYRCVS |
| | | | VLTVLHQDWLNGKEYKCKVSNKALPAPIEKTISKAKGQPREPQVYTL |
| | | | PPSREEMTKNQVSLTCLVKGFYPSDIAVEWESNGQPENNYKTTPPVL |
| | | | DSDGSFFLYSKLTVDKSRWQQGNVFSCSVMHEALHNHYTQKSLSLSP |
| | | | GK |
| 346. | FL_3xCD3- | VH CDR1 | NARMAVS |
| | scFc | | |
| 347. | FL_3xCD3- | VH CDR2 | HIFSNDEKSYSTSLKS |
| | scFc | | |
| 348. | FL_3xCD3- | VH CDR3 | IVGYGSGWYGYFDY |
| | scFc | | |
| 349. | FL_3xCD3- | VL CDR1 | RASQDIRNDLG |
| | scFc | | |
| 350. | FL_3xCD3- | VL CDR2 | AASTLQS |
| | scFc | | |
| 351. | FL_3xCD3- | VL CDR3 | LQHNSYPLT |
| | scFc | | |
| 352. | FL_3xCD3- | VH | QVTLKESGPALVKPTETLTLTCTLSGFSLNNARMAVSWIRQPPGKTL |
| | scFc | | EWLAHIFSNDEKSYSTSLKSRLTISKDTSKGQVVLTMTNMDPVDTAT |
| | | | YYCARIVGYGSGWYGYFDYWGQGTLVTVSS |
| 353. | FL_3xCD3- | VL | DIQMTQSPSSLSASVGDRVTITCRASQDIRNDLGWYQQKPGKAPKRL |
| | scFc | | IYAASTLQSGVPSRFSGSGSGTEFTLTISSLQPEDFATYYCLQHNSY |
| | | | PLTFGGGTKVEIK |
| 354. | FL_3xCD3- | scFv | QVTLKESGPALVKPTETLTLTCTLSGFSLNNARMAVSWIRQPPGKTL |
| | scFc | | EWLAHIFSNDEKSYSTSLKSRLTISKDTSKGQVVLTMTNMDPVDTAT |
| | | | YYCARIVGYGSGWYGYFDYWGQGTLVTVSSGGGGSGGGGSGGGGSDI |
| | | | QMTQSPSSLSASVGDRVTITCRASQDIRNDLGWYQQKPGKAPKRLIY |
| | | | AASTLQSGVPSRFSGSGSGTEFTLTISSLQPEDFATYYCLQHNSYPL |
| | | | TFGGGTKVEIKS |
| 355. | FL_3xCD3- | Bispecific | QVTLKESGPALVKPTETLTLTCTLSGFSLNNARMAVSWIRQPPGKTL |
| | scFc | molecule | EWLAHIFSNDEKSYSTSLKSRLTISKDTSKGQVVLTMTNMDPVDTAT |
| | | | YYCARIVGYGSGWYGYFDYWGQGTLVTVSSGGGGSGGGGSGGGGSDI |
| | | | QMTQSPSSLSASVGDRVTITCRASQDIRNDLGWYQQKPGKAPKRLIY |
| | | | AASTLQSGVPSRFSGSGSGTEFTLTISSLQPEDFATYYCLQHNSYPL |
| | | | TFGGGTKVEIKSGGGGSEVQLVESGGGLVQPGGSLKLSCAASGFTFN |
| | | | KYAMNWVRQAPGKGLEWVARIRSKYNNYATYYADSVKDRFTISRDDS |
| | | | KNTAYLQMNNLKTEDTAVYYCVRHGNFGNSYISYWAYWGQGTLVTVS |
| | | | SGGGGSGGGGSGGGGSQTVVTQEPSLTVSPGGTVTLTCGSSTGAVTS |
| | | | GNYPNWVQQKPGQAPRGLIGGTKFLAPGTPARFSGSLLGGKAALTLS |
| | | | GVQPEDEAEYYCVLWYSNRWVFGGGTKLTVL |
| 356. | FL_3xCD3- | Bispecific | QVTLKESGPALVKPTETLTLTCTLSGFSLNNARMAVSWIRQPPGKTL |
| | scFc | HLE | EWLAHIFSNDEKSYSTSLKSRLTISKDTSKGQVVLTMTNMDPVDTAT |
| | | molecule | YYCARIVGYGSGWYGYFDYWGQGTLVTVSSGGGGSGGGGSGGGGSDI |
| | | | QMTQSPSSLSASVGDRVTITCRASQDIRNDLGWYQQKPGKAPKRLIY |
| | | | AASTLQSGVPSRFSGSGSGTEFTLTISSLQPEDFATYYCLQHNSYPL |
| | | | TFGGGTKVEIKSGGGGSEVQLVESGGGLVQPGGSLKLSCAASGFTFN |
| | | | KYAMNWVRQAPGKGLEWVARIRSKYNNYATYYADSVKDRFTISRDDS |
| | | | KNTAYLQMNNLKTEDTAVYYCVRHGNFGNSYISYWAYWGQGTLVTVS |
| | | | SGGGGSGGGGSGGGGSQTVVTQEPSLTVSPGGTVTLTCGSSTGAVTS |
| | | | GNYPNWVQQKPGQAPRGLIGGTKFLAPGTPARFSGSLLGGKAALTLS |
| | | | GVQPEDEAEYYCVLWYSNRWVFGGGTKLTVLGGGGDKTHTCPPCPAP |
| | | | ELLGGPSVFLFPPKPKDTLMISRTPEVTCVVVDVSHEDPEVKFNWYV |
| | | | DGVEVHNAKTKPCEEQYGSTYRCVSVLTVLHQDWLNGKEYKCKVSNK |
| | | | ALPAPIEKTISKAKGQPREPQVYTLPPSREEMTKNQVSLTCLVKGFY |
| | | | PSDIAVEWESNGQPENNYKTTPPVLDSDGSFFLYSKLTVDKSRWQQG |
| | | | NVFSCSVMHEALHNHYTQKSLSLSPGKGGGGSGGGGSGGGGSGGGGS |
| | | | GGGGSGGGGSDKTHTCPPCPAPELLGGPSVFLFPPKPKDTLMISRTP |
| | | | EVTCVVVDVSHEDPEVKFNWYVDGVEVHNAKTKPCEEQYGSTYRCVS |
| | | | VLTVLHQDWLNGKEYKCKVSNKALPAPIEKTISKAKGQPREPQVYTL |
| | | | PPSREEMTKNQVSLTCLVKGFYPSDIAVEWESNGQPENNYKTTPPVL |
| | | | DSDGSFFLYSKLTVDKSRWQQGNVFSCSVMHEALHNHYTQKSLSLSP |
| | | | GK |
| 357. | FL_3_CCxCD | VH | QVTLKESGPALVKPTETLTLTCTLSGFSLNNARMAVSWIRQPPGKCL |
| | 3-scFc | | EWLAHIFSNDEKSYSTSLKSRLTISKDTSKGQVVLTMTNMDPVDTAT |
| | | | YYCARIVGYGSGWYGYFDYWGQGTLVTVSS |
| 358. | FL_3_CCxCD | VL | DIQMTQSPSSLSASVGDRVTITCRASQDIRNDLGWYQQKPGKAPKRL |
| | 3-scFc | | IYAASTLQSGVPSRFSGSGSGTEFTLTISSLQPEDFATYYCLQHNSY |
| | | | PLTFGCGTKVEIK |
| 359. | FL_3_CCxCD | scFv | QVTLKESGPALVKPTETLTLTCTLSGFSLNNARMAVSWIRQPPGKCL |
| | 3-scFc | | EWLAHIFSNDEKSYSTSLKSRLTISKDTSKGQVVLTMTNMDPVDTAT |
| | | | YYCARIVGYGSGWYGYFDYWGQGTLVTVSSGGGGSGGGGSGGGGSDI |
| | | | QMTQSPSSLSASVGDRVTITCRASQDIRNDLGWYQQKPGKAPKRLIY |
| | | | AASTLQSGVPSRFSGSGSGTEFTLTISSLQPEDFATYYCLQHNSYPL |
| | | | TFGCGTKVEIKS |
| 360. | FL_3_CCxCD | Bispecific | QVTLKESGPALVKPTETLTLTCTLSGFSLNNARMAVSWIRQPPGKCL |
| | 3-scFc | molecule | EWLAHIFSNDEKSYSTSLKSRLTISKDTSKGQVVLTMTNMDPVDTAT |
| | | | YYCARIVGYGSGWYGYFDYWGQGTLVTVSSGGGGSGGGGSGGGGSDI |
| | | | QMTQSPSSLSASVGDRVTITCRASQDIRNDLGWYQQKPGKAPKRLIY |
| | | | AASTLQSGVPSRFSGSGSGTEFTLTISSLQPEDFATYYCLQHNSYPL |
| | | | TFGCGTKVEIKSGGGGSEVQLVESGGGLVQPGGSLKLSCAASGFTFN |
| | | | KYAMNWVRQAPGKGLEWVARIRSKYNNYATYYADSVKDRFTISRDDS |
| | | | KNTAYLQMNNLKTEDTAVYYCVRHGNFGNSYISYWAYWGQGTLVTVS |
| | | | SGGGGSGGGGSGGGGSQTVVTQEPSLTVSPGGTVTLTCGSSTGAVTS |
| | | | GNYPNWVQQKPGQAPRGLIGGTKFLAPGTPARFSGSLLGGKAALTLS |
| | | | GVQPEDEAEYYCVLWYSNRWVFGGGTKLTVLG |
| 361. | FL_3_CCxCD | Bispecific | QVTLKESGPALVKPTETLTLTCTLSGFSLNNARMAVSWIRQPPGKCL |
| | 3-scFc | HLE | EWLAHIFSNDEKSYSTSLKSRLTISKDTSKGQVVLTMTNMDPVDTAT |
| | | molecule | YYCARIVGYGSGWYGYFDYWGQGTLVTVSSGGGGSGGGGSGGGGSDI |
| | | | QMTQSPSSLSASVGDRVTITCRASQDIRNDLGWYQQKPGKAPKRLIY |
| | | | AASTLQSGVPSRFSGSGSGTEFTLTISSLQPEDFATYYCLQHNSYPL |
| | | | TFGCGTKVEIKSGGGGSEVQLVESGGGLVQPGGSLKLSCAASGFTFN |
| | | | KYAMNWVRQAPGKGLEWVARIRSKYNNYATYYADSVKDRFTISRDDS |
| | | | KNTAYLQMNNLKTEDTAVYYCVRHGNFGNSYISYWAYWGQGTLVTVS |
| | | | SGGGGSGGGGSGGGGSQTVVTQEPSLTVSPGGTVTLTCGSSTGAVTS |
| | | | GNYPNWVQQKPGQAPRGLIGGTKFLAPGTPARFSGSLLGGKAALTLS |
| | | | GVQPEDEAEYYCVLWYSNRWVFGGGTKLTVLGGGGDKTHTCPPCPAP |
| | | | ELLGGPSVFLFPPKPKDTLMISRTPEVTCVVVDVSHEDPEVKFNWYV |
| | | | DGVEVHNAKTKPCEEQYGSTYRCVSVLTVLHQDWLNGKEYKCKVSNK |
| | | | ALPAPIEKTISKAKGQPREPQVYTLPPSREEMTKNQVSLTCLVKGFY |
| | | | PSDIAVEWESNGQPENNYKTTPPVLDSDGSFFLYSKLTVDKSRWQQG |
| | | | NVFSCSVMHEALHNHYTQKSLSLSPGKGGGGSGGGGSGGGGSGGGGS |
| | | | GGGGSGGGGSDKTHTCPPCPAPELLGGPSVFLFPPKPKDTLMISRTP |
| | | | EVTCVVVDVSHEDPEVKFNWYVDGVEVHNAKTKPCEEQYGSTYRCVS |
| | | | VLTVLHQDWLNGKEYKCKVSNKALPAPIEKTISKAKGQPREPQVYTL |
| | | | PPSREEMTKNQVSLTCLVKGFYPSDIAVEWESNGQPENNYKTTPPVL |
| | | | DSDGSFFLYSKLTVDKSRWQQGNVFSCSVMHEALHNHYTQKSLSLSP |
| | | | GK |
| 362. | FL_4xCD3- | VH CDR1 | NAKMGVS |
| | scFc | | |
| 363. | FL_4xCD3- | VH CDR2 | HIFSNDEKSYSTSLKS |
| | scFc | | |
| 364. | FL_4xCD3- | VH CDR3 | IVGYGSGWYGYFDY |
| | scFc | | |
| 365. | FL_4xCD3- | VL CDR1 | RASQDIRDDLG |
| | scFc | | |
| 366. | FL_4xCD3- | VL CDR2 | GASTLQS |
| | scFc | | |
| 367. | FL_4xCD3- | VL CDR3 | LQHNSYPLT |
| | scFc | | |
| 368. | FL_4xCD3- | VH | QVTLKESGPALVKPTETLTLTCTLSGFSLNNAKMGVSWIRQPPGKAL |
| | scFc | | EWLAHIFSNDEKSYSTSLKSRLTISKDTSKGQVVLTMTNMDPVDTAT |
| | | | YYCARIVGYGSGWYGYFDYWGQGTLVTVSS |
| 369. | FL_4xCD3- | VL | DIQMTQSPSSLSASVGDRVTITCRASQDIRDDLGWYQQKPGNAPKRL |
| | scFc | | IYGASTLQSGVPSRFSGSGSGTEFTLTISSLQPEDFATYYCLQHNSY |
| | | | PLTFGGGTKVDIK |
| 370. | FL_4xCD3- | scFv | QVTLKESGPALVKPTETLTLTCTLSGFSLNNAKMGVSWIRQPPGKAL |
| | scFc | | EWLAHIFSNDEKSYSTSLKSRLTISKDTSKGQVVLTMTNMDPVDTAT |
| | | | YYCARIVGYGSGWYGYFDYWGQGTLVTVSSGGGGSGGGGSGGGGSDI |
| | | | QMTQSP5SLSASVGDRVTITCRASQDIRDDLGWYQQKPGNAPKRLIY |
| | | | GASTLQSGVPSRFSGSGSGTEFTLTISSLQPEDFATYYCLQHNSYPL |
| | | | TFGGGTKVDIKS |
| 371. | FL_4xCD3- | Bispecific | QVTLKESGPALVKPTETLTLTCTLSGFSLNNAKMGVSWIRQPPGKAL |
| | scFc | molecule | EWLAHIFSNDEKSYSTSLKSRLTISKDTSKGQVVLTMTNMDPVDTAT |
| | | | YYCARIVGYGSGWYGYFDYWGQGTLVTVSSGGGGSGGGGSGGGGSDI |
| | | | QMTQSPSSLSASVGDRVTITCRASQDIRDDLGWYQQKPGNAPKRLIY |
| | | | GASTLQSGVPSRFSGSGSGTEFTLTISSLQPEDFATYYCLQHNSYPL |
| | | | TFGGGTKVDIKSGGGGSEVQLVESGGGLVQPGGSLKLSCAASGFTFN |
| | | | KYAMNWVRQAPGKGLEWVARIRSKYNNYATYYADSVKDRFTISRDDS |
| | | | KNTAYLQMNNLKTEDTAVYYCVRHGNFGNSYISYWAYWGQGTLVTVS |
| | | | SGGGGSGGGGSGGGGSQTVVTQEPSLTVSPGGTVTLTCGSSTGAVTS |
| | | | GNYPNWVQQKPGQAPRGLIGGTKFLAPGTPARFSGSLLGGKAALTLS |
| | | | GVQPEDEAEYYCVLWYSNRWVFGGGTKLTVL |
| 372. | FL_4xCD3- | Bispecific | QVTLKESGPALVKPTETLTLTCTLSGFSLNNAKMGVSWIRQPPGKAL |
| | scFc | HLE | EWLAHIFSNDEKSYSTSLKSRLTISKDTSKGQVVLTMTNMDPVDTAT |
| | | molecule | YYCARIVGYGSGWYGYFDYWGQGTLVTVSSGGGGSGGGGSGGGGSDI |
| | | | QMTQSPSSLSASVGDRVTITCRASQDIRDDLGWYQQKPGNAPKRLIY |
| | | | GASTLQSGVPSRFSGSGSGTEFTLTISSLQPEDFATYYCLQHNSYPL |
| | | | TFGGGTKVDIKSGGGGSEVQLVESGGGLVQPGGSLKLSCAASGFTFN |
| | | | KYAMNWVRQAPGKGLEWVARIRSKYNNYATYYADSVKDRFTISRDDS |
| | | | KNTAYLQMNNLKTEDTAVYYCVRHGNFGNSYISYWAYWGQGTLVTVS |
| | | | SGGGGSGGGGSGGGGSQTVVTQEPSLTVSPGGTVTLTCGSSTGAVTS |
| | | | GNYPNWVQQKPGQAPRGLIGGTKFLAPGTPARFSGSLLGGKAALTLS |
| | | | GVQPEDEAEYYCVLWYSNRWVFGGGTKLTVLGGGGDKTHTCPPCPAP |
| | | | ELLGGPSVFLFPPKPKDTLMISRTPEVTCVVVDVSHEDPEVKFNWYV |
| | | | DGVEVHNAKTKPCEEQYGSTYRCVSVLTVLHQDWLNGKEYKCKVSNK |
| | | | ALPAPIEKTISKAKGQPREPQVYTLPPSREEMTKNQVSLTCLVKGFY |
| | | | PSDIAVEWESNGQPENNYKTTPPVLDSDGSFFLYSKLTVDKSRWQQG |
| | | | NVFSCSVMHEALHNHYTQKSLSLSPGKGGGGSGGGGSGGGGSGGGGS |
| | | | GGGGSGGGGSDKTHTCPPCPAPELLGGPSVFLFPPKPKDTLMISRTP |
| | | | EVTCVVVDVSHEDPEVKFNWYVDGVEVHNAKTKPCEEQYGSTYRCVS |
| | | | VLTVLHQDWLNGKEYKCKVSNKALPAPIEKTISKAKGQPREPQVYTL |
| | | | PPSREEMTKNQVSLTCLVKGFYPSDIAVEWESNGQPENNYKTTPPVL |
| | | | DSDGSFFLYSKLTVDKSRWQQGNVFSCSVMHEALHNHYTQKSLSLSP |
| | | | GK |
| 373. | FL_4_CCxCD | VH | QVTLKESGPALVKPTETLTLTCTLSGFSLNNAKMGVSWIRQPPGKCL |
| | 3-scFc | | EWLAHIFSNDEKSYSTSLKSRLTISKDTSKGQVVLTMTNMDPVDTAT |
| | | | YYCARIVGYGSGWYGYFDYWGQGTLVTVSS |
| 374. | FL_4_CCxCD | VL | DIQMTQSPSSLSASVGDRVTITCRASQDIRDDLGWYQQKPGNAPKRL |
| | 3-scFc | | IYGASTLQSGVPSRFSGSGSGTEFTLTISSLQPEDFATYYCLQHNSY |
| | | | PLTFGCGTKVDIK |
| 375. | FL_4_CCxCD- | scFv | QVTLKESGPALVKPTETLTLTCTLSGFSLNNAKMGVSWIRQPPGKCL |
| | scFc | | EWLAHIFSNDEKSYSTSLKSRLTISKDTSKGQVVLTMTNMDPVDTAT |
| | | | YYCARIVGYGSGWYGYFDYWGQGTLVTVSSGGGGSGGGGSGGGGSDI |
| | | | QMTQSPSSLSASVGDRVTITCRASQDIRDDLGWYQQKPGNAPKRLIY |
| | | | GASTLQSGVPSRFSGSGSGTEFTLTISSLQPEDFATYYCLQHNSYPL |
| | | | TFGCGTKVDIKS |
| 376. | FL_4_CCxCD | Bispecific | QVTLKESGPALVKPTETLTLTCTLSGFSLNNAKMGVSWIRQPPGKCL |
| | 3-scFc | molecule | EWLAHIFSNDEKSYSTSLKSRLTISKDTSKGQVVLTMTNMDPVDTAT |
| | | | YYCARIVGYGSGWYGYFDYWGQGTLVTVSSGGGGSGGGGSGGGGSDI |
| | | | QMTQSPSSLSASVGDRVTITCRASQDIRDDLGWYQQKPGNAPKRLIY |
| | | | GASTLQSGVPSRFSGSGSGTEFTLTISSLQPEDFATYYCLQHNSYPL |
| | | | TFGCGTKVDIKSGGGGSEVQLVESGGGLVQPGGSLKLSCAASGFTFN |
| | | | KYAMNWVRQAPGKGLEWVARIRSKYNNYATYYADSVKDRFTISRDDS |
| | | | KNTAYLQMNNLKTEDTAVYYCVRHGNFGNSYISYWAYWGQGTLVTVS |
| | | | SGGGGSGGGGSGGGGSQTVVTQEPSLTVSPGGTVTLTCGSSTGAVTS |
| | | | GNYPNWVQQKPGQAPRGLIGGTKFLAPGTPARFSGSLLGGKAALTLS |
| | | | GVQPEDEAEYYCVLWYSNRWVFGGGTKLTVL |
| 377. | FL_4_CCxCD | Bispecific | QVTLKESGPALVKPTETLTLTCTLSGFSLNNAKMGVSWIRQPPGKCL |
| | 3-scFc | HLE | EWLAHIFSNDEKSYSTSLKSRLTISKDTSKGQVVLTMTNMDPVDTAT |
| | | molecule | YYCARIVGYGSGWYGYFDYWGQGTLVTVSSGGGGSGGGGSGGGGSDI |
| | | | QMTQSPSSLSASVGDRVTITCRASQDIRDDLGWYQQKPGNAPKRLIY |
| | | | GASTLQSGVPSRFSGSGSGTEFTLTISSLQPEDFATYYCLQHNSYPL |
| | | | TFGCGTKVDIKSGGGGSEVQLVESGGGLVQPGGSLKLSCAASGFTFN |
| | | | KYAMNWVRQAPGKGLEWVARIRSKYNNYATYYADSVKDRFTISRDDS |
| | | | KNTAYLQMNNLKTEDTAVYYCVRHGNFGNSYISYWAYWGQGTLVTVS |
| | | | SGGGGSGGGGSGGGGSQTVVTQEPSLTVSPGGTVTLTCGSSTGAVTS |
| | | | GNYPNWVQQKPGQAPRGLIGGTKFLAPGTPARFSGSLLGGKAALTLS |
| | | | GVQPEDEAEYYCVLWYSNRWVFGGGTKLTVLGGGGDKTHTCPPCPAP |
| | | | ELLGGPSVFLFPPKPKDTLMISRTPEVTCVVVDVSHEDPEVKFNWYV |
| | | | DGVEVHNAKTKPCEEQYGSTYRCVSVLTVLHQDWLNGKEYKCKVSNK |
| | | | ALPAPIEKTISKAKGQPREPQVYTLPPSREEMTKNQVSLTCLVKGFY |
| | | | PSDIAVEWESNGQPENNYKTTPPVLDSDGSFFLYSKLTVDKSRWQQG |
| | | | NVFSCSVMHEALHNHYTQKSLSLSPGKGGGGSGGGGSGGGGSGGGGS |
| | | | GGGGSGGGGSDKTHTCPPCPAPELLGGPSVFLFPPKPKDTLMISRTP |
| | | | EVTCVVVDVSHEDPEVKFNWYVDGVEVHNAKTKPCEEQYGSTYRCVS |
| | | | VLTVLHQDWLNGKEYKCKVSNKALPAPIEKTISKAKGQPREPQVYTL |
| | | | PPSREEMTKNQVSLTCLVKGFYPSDIAVEWESNGQPENNYKTTPPVL |
| | | | DSDGSFFLYSKLTVDKSRWQQGNVFSCSVMHEALHNHYTQKSLSLSP |
| | | | GK |
| 378. | FL_5xCD3- | VH CDR1 | NARMAVS |
| | scFc | | |
| 379. | FL_5xCD3- | VH CDR2 | HIFSNDEKSYSTSLKS |
| | scFc | | |
| 380. | FL_5xCD3- | VH CDR3 | IVGYGSGWYGYFDY |
| | scFc | | |
| 381. | FL_5xCD3- | VL CDR1 | RASQDIRYDLA |
| | scFc | | |
| 382. | FL_5xCD3- | VL CDR2 | AASSLQS |
| | scFc | | |
| 383. | FL_5xCD3- | VL CDR3 | LQHNFYPLT |
| | scFc | | |
| 384. | FL_5xCD3- | VH | QVTLKESGPVLVKPTETLTLTCTVSGFSLRNARMAVSWIRQPPGKTL |
| | scFc | | EWLAHIFSNDEKSYSTSLKSRLTISKDTSKSQVVLTMTNMDPVDTAT |
| | | | YYCARIVGYGSGWYGYFDYWGQGTLVTVSS |
| 385. | FL_5xCD3- | VL | DIQMTQSPSSVSASVGDRVTITCRASQDIRYDLAWYQQKPGKAPKRL |
| | scFc | | IYAASSLQSGVPSRFSGSGSGTEFTLTISSLQPEDFATYYCLQHNFY |
| | | | PLTFGGGTKVEIK |
| 386. | FL_5xCD3- | scFv | QVTLKESGPVLVKPTETLTLTCTVSGFSLRNARMAVSWIRQPPGKTL |
| | scFc | | EWLAHIFSNDEKSYSTSLKSRLTISKDTSKSQVVLTMTNMDPVDTAT |
| | | | YYCARIVGYGSGWYGYFDYWGQGTLVTVSSGGGGSGGGGSGGGGSDI |
| | | | QMTQSPSSVSASVGDRVTITCRASQDIRYDLAWYQQKPGKAPKRLIY |
| | | | AASSLQSGVPSRFSGSGSGTEFTLTISSLQPEDFATYYCLQHNFYPL |
| | | | TFGGGTKVEIKS |
| 387. | FL_5xCD3- | Bispecific | QVTLKESGPVLVKPTETLTLTCTVSGFSLRNARMAVSWIRQPPGKTL |
| | scFc | molecule | EWLAHIFSNDEKSYSTSLKSRLTISKDTSKSQVVLTMTNMDPVDTAT |
| | | | YYCARIVGYGSGWYGYFDYWGQGTLVTVSSGGGGSGGGGSGGGGSDI |
| | | | QMTQSPSSVSASVGDRVTITCRASQDIRYDLAWYQQKPGKAPKRLIY |
| | | | AASSLQSGVPSRFSGSGSGTEFTLTISSLQPEDFATYYCLQHNFYPL |
| | | | TFGGGTKVEIKSGGGGSEVQLVESGGGLVQPGGSLKLSCAASGFTFN |
| | | | KYAMNWVRQAPGKGLEWVARIRSKYNNYATYYADSVKDRFTISRDDS |
| | | | KNTAYLQMNNLKTEDTAVYYCVRHGNFGNSYISYWAYWGQGTLVTVS |
| | | | SGGGGSGGGGSGGGGSQTVVTQEPSLTVSPGGTVTLTCGSSTGAVTS |
| | | | GNYPNWVQQKPGQAPRGLIGGTKFLAPGTPARFSGSLLGGKAALTLS |
| | | | GVQPEDEAEYYCVLWYSNRWVFGGGTKLTVL |
| 388. | FL_5xCD3- | Bispecific | QVTLKESGPVLVKPTETLTLTCTVSGFSLRNARMAVSWIRQPPGKTL |
| | scFc | HLE | EWLAHIFSNDEKSYSTSLKSRLTISKDTSKSQVVLTMTNMDPVDTAT |
| | | molecule | YYCARIVGYGSGWYGYFDYWGQGTLVTVSSGGGGSGGGGSGGGGSDI |
| | | | QMTQSPSSVSASVGDRVTITCRASQDIRYDLAWYQQKPGKAPKRLIY |
| | | | AASSLQSGVPSRFSGSGSGTEFTLTISSLQPEDFATYYCLQHNFYPL |
| | | | TFGGGTKVEIKSGGGGSEVQLVESGGGLVQPGGSLKLSCAASGFTFN |
| | | | KYAMNWVRQAPGKGLEWVARIRSKYNNYATYYADSVKDRFTISRDDS |
| | | | KNTAYLQMNNLKTEDTAVYYCVRHGNFGNSYISYWAYWGQGTLVTVS |
| | | | SGGGGSGGGGSGGGGSQTVVTQEPSLTVSPGGTVTLTCGSSTGAVTS |
| | | | GNYPNWVQQKPGQAPRGLIGGTKFLAPGTPARFSGSLLGGKAALTLS |
| | | | GVQPEDEAEYYCVLWYSNRWVFGGGTKLTVLGGGGDKTHTCPPCPAP |
| | | | ELLGGPSVFLFPPKPKDTLMISRTPEVTCVVVDVSHEDPEVKFNWYV |
| | | | DGVEVHNAKTKPCEEQYGSTYRCVSVLTVLHQDWLNGKEYKCKVSNK |
| | | | ALPAPIEKTISKAKGQPREPQVYTLPPSREEMTKNQVSLTCLVKGFY |
| | | | PSDIAVEWESNGQPENNYKTTPPVLDSDGSFFLYSKLTVDKSRWQQG |
| | | | NVFSCSVMHEALHNHYTQKSLSLSPGKGGGGSGGGGSGGGGSGGGGS |
| | | | GGGGSGGGGSDKTHTCPPCPAPELLGGPSVFLFPPKPKDTLMISRTP |
| | | | EVTCVVVDVSHEDPEVKFNWYVDGVEVHNAKTKPCEEQYGSTYRCVS |
| | | | VLTVLHQDWLNGKEYKCKVSNKALPAPIEKTISKAKGQPREPQVYTL |
| | | | PPSREEMTKNQVSLTCLVKGFYPSDIAVEWESNGQPENNYKTTPPVL |
| | | | DSDGSFFLYSKLTVDKSRWQQGNVFSCSVMHEALHNHYTQKSLSLSP |
| | | | GK |
| 389. | FL_5_CCxCD | VH | QVTLKESGPVLVKPTETLTLTCTVSGFSLRNARMAVSWIRQPPGKCL |
| | 3-scFc | | EWLAHIFSNDEKSYSTSLKSRLTISKDTSKSQVVLTMTNMDPVDTAT |
| | | | YYCARIVGYGSGWYGYFDYWGQGTLVTVSS |
| 390. | FL_5_CCxCD | VL | DIQMTQSPSSVSASVGDRVTITCRASQDIRYDLAWYQQKPGKAPKRL |
| | 3-scFc | | IYAASSLQSGVPSRFSGSGSGTEFTLTISSLQPEDFATYYCLQHNFY |
| | | | PLTFGCGTKVEIK |
| 391. | FL_5_CCxCD | scFv | QVTLKESGPVLVKPTETLTLTCTVSGFSLRNARMAVSWIRQPPGKCL |
| | 3-scFc | | EWLAHIFSNDEKSYSTSLKSRLTISKDTSKSQVVLTMTNMDPVDTAT |
| | | | YYCARIVGYGSGWYGYFDYWGQGTLVTVSSGGGGSGGGGSGGGGSDI |
| | | | QMTQSPSSVSASVGDRVTITCRASQDIRYDLAWYQQKPGKAPKRLIY |
| | | | AASSLQSGVPSRFSGSGSGTEFTLTISSLQPEDFATYYCLQHNFYPL |
| | | | TFGCGTKVEIKS |
| 392. | FL_5_CCxCD | Bispecific | QVTLKESGPVLVKPTETLTLTCTVSGFSLRNARMAVSWIRQPPGKCL |
| | 3-scFc | molecule | EWLAHIFSNDEKSYSTSLKSRLTISKDTSKSQVVLTMTNMDPVDTAT |
| | | | YYCARIVGYGSGWYGYFDYWGQGTLVTVSSGGGGSGGGGSGGGGSDI |
| | | | QMTQSPSSVSASVGDRVTITCRASQDIRYDLAWYQQKPGKAPKRLIY |
| | | | AASSLQSGVPSRFSGSGSGTEFTLTISSLQPEDFATYYCLQHNFYPL |
| | | | TFGCGTKVEIKSGGGGSEVQLVESGGGLVQPGGSLKLSCAASGFTFN |
| | | | KYAMNWVRQAPGKGLEWVARIRSKYNNYATYYADSVKDRFTISRDDS |
| | | | KNTAYLQMNNLKTEDTAVYYCVRHGNFGNSYISYWAYWGQGTLVTVS |
| | | | SGGGGSGGGGSGGGGSQTVVTQEPSLTVSPGGTVTLTCGSSTGAVTS |
| | | | GNYPNWVQQKPGQAPRGLIGGTKFLAPGTPARFSGSLLGGKAALTLS |
| | | | GVQPEDEAEYYCVLWYSNRWVFGGGTKLTVL |
| 393. | FL_5_CCxCD | Bispecific | QVTLKESGPVLVKPTETLTLTCTVSGFSLRNARMAVSWIRQPPGKCL |
| | 3-scFc | HLE | EWLAHIFSNDEKSYSTSLKSRLTISKDTSKSQVVLTMTNMDPVDTAT |
| | | molecule | YYCARIVGYGSGWYGYFDYWGQGTLVTVSSGGGGSGGGGSGGGGSDI |
| | | | QMTQSPSSVSASVGDRVTITCRASQDIRYDLAWYQQKPGKAPKRLIY |
| | | | AASSLQSGVPSRFSGSGSGTEFTLTISSLQPEDFATYYCLQHNFYPL |
| | | | TFGCGTKVEIKSGGGGSEVQLVESGGGLVQPGGSLKLSCAASGFTFN |
| | | | KYAMNWVRQAPGKGLEWVARIRSKYNNYATYYADSVKDRFTISRDDS |
| | | | KNTAYLQMNNLKTEDTAVYYCVRHGNFGNSYISYWAYWGQGTLVTVS |
| | | | SGGGGSGGGGSGGGGSQTVVTQEPSLTVSPGGTVTLTCGSSTGAVTS |
| | | | GNYPNWVQQKPGQAPRGLIGGTKFLAPGTPARFSGSLLGGKAALTLS |
| | | | GVQPEDEAEYYCVLWYSNRWVFGGGTKLTVLGGGGDKTHTCPPCPAP |
| | | | ELLGGPSVFLFPPKPKDTLMISRTPEVTCVVVDVSHEDPEVKFNWYV |
| | | | DGVEVHNAKTKPCEEQYGSTYRCVSVLTVLHQDWLNGKEYKCKVSNK |
| | | | ALPAPIEKTISKAKGQPREPQVYTLPPSREEMTKNQVSLTCLVKGFY |
| | | | PSDIAVEWESNGQPENNYKTTPPVLDSDGSFFLYSKLTVDKSRWQQG |
| | | | NVFSCSVMHEALHNHYTQKSLSLSPGKGGGGSGGGGSGGGGSGGGGS |
| | | | GGGGSGGGGSDKTHTCPPCPAPELLGGPSVFLFPPKPKDTLMISRTP |
| | | | EVTCVVVDVSHEDPEVKFNWYVDGVEVHNAKTKPCEEQYGSTYRCVS |
| | | | VLTVLHQDWLNGKEYKCKVSNKALPAPIEKTISKAKGQPREPQVYTL |
| | | | PPSREEMTKNQVSLTCLVKGFYPSDIAVEWESNGQPENNYKTTPPVL |
| | | | DSDGSFFLYSKLTVDKSRWQQGNVFSCSVMHEALHNHYTQKSLSLSP |
| | | | GK |
| 394. | FL_6xCD3- | VH CDR1 | NARMGVS |
| | scFc | | |
| 395. | FL_6xCD3- | VH CDR2 | HIFSNDEKSFSTSLKN |
| | scFc | | |
| 396. | FL_6xCD3- | VH CDR3 | MVGYGSGWYAYFDY |
| | scFc | | |
| 397. | FL_6xCD3- | VL CDR1 | RASQSISSYLN |
| | scFc | | |
| 398. | FL_6xCD3- | VL CDR2 | AASSLQS |
| | scFc | | |
| 399. | FL_6xCD3- | VL CDR3 | LQHNSYPLT |
| | scFc | | |
| 400. | FL_6xCD3- | VH | QVTLKESGPVLVKPTQTLTLTCTFSGFSLSNARMGVSWIRQPPGKAL |
| | scFc | | EWLAHIFSNDEKSFSTSLKNRLTISKDTSKSQVVLTMTNMDPVDTAT |
| | | | YYCARMVGYGSGWYAYFDYWGQGTQVTVSS |
| 401. | FL_6xCD3- | VL | DIQMTQSPSSLSASVGDRVTITCRASQSISSYLNWYQQKPGKAPKLL |
| | scFc | | IYAASSLQSGVPSRFSGSGSGTDFTLTISSLQPEDFATYYCLQHNSY |
| | | | PLTFGGGTKVEIK |
| 402. | FL_6xCD3- | scFv | QVTLKESGPVLVKPTQTLTLTCTFSGFSLSNARMGVSWIRQPPGKAL |
| | scFc | | EWLAHIFSNDEKSFSTSLKNRLTISKDTSKSQVVLTMTNMDPVDTAT |
| | | | YYCARMVGYGSGWYAYFDYWGQGTQVTVSSGGGGSGGGGSGGGGSDI |
| | | | QMTQSPSSLSASVGDRVTITCRASQSISSYLNWYQQKPGKAPKLLIY |
| | | | AASSLQSGVPSRFSGSGSGTDFTLTISSLQPEDFATYYCLQHNSYPL |
| | | | TFGGGTKVEIKS |
| 403. | FL_6xCD3- | Bispecific | QVTLKESGPVLVKPTQTLTLTCTFSGFSLSNARMGVSWIRQPPGKAL |
| | scFc | molecule | EWLAHIFSNDEKSFSTSLKNRLTISKDTSKSQVVLTMTNMDPVDTAT |
| | | | YYCARMVGYGSGWYAYFDYWGQGTQVTVSSGGGGSGGGGSGGGGSDI |
| | | | QMTQSPSSLSASVGDRVTITCRASQSISSYLNWYQQKPGKAPKLLIY |
| | | | AASSLQSGVPSRFSGSGSGTDFTLTISSLQPEDFATYYCLQHNSYPL |
| | | | TFGGGTKVEIKSGGGGSEVQLVESGGGLVQPGGSLKLSCAASGFTFN |
| | | | KYAMNWVRQAPGKGLEWVARIRSKYNNYATYYADSVKDRFTISRDDS |
| | | | KNTAYLQMNNLKTEDTAVYYCVRHGNFGNSYISYWAYWGQGTLVTVS |
| | | | SGGGGSGGGGSGGGGSQTVVTQEPSLTVSPGGTVTLTCGSSTGAVTS |
| | | | GNYPNWVQQKPGQAPRGLIGGTKFLAPGTPARFSGSLLGGKAALTLS |
| | | | GVQPEDEAEYYCVLWYSNRWVFGGGTKLTVL |
| 404. | FL_6xCD3- | Bispecific | QVTLKESGPVLVKPTQTLTLTCTFSGFSLSNARMGVSWIRQPPGKAL |
| | scFc | HLE | EWLAHIFSNDEKSFSTSLKNRLTISKDTSKSQVVLTMTNMDPVDTAT |
| | | molecule | YYCARMVGYGSGWYAYFDYWGQGTQVTVSSGGGGSGGGGSGGGGSDI |
| | | | QMTQSPSSLSASVGDRVTITCRASQSISSYLNWYQQKPGKAPKLLIY |
| | | | AASSLQSGVPSRFSGSGSGTDFTLTISSLQPEDFATYYCLQHNSYPL |
| | | | TFGGGTKVEIKSGGGGSEVQLVESGGGLVQPGGSLKLSCAASGFTFN |
| | | | KYAMNWVRQAPGKGLEWVARIRSKYNNYATYYADSVKDRFTISRDDS |
| | | | KNTAYLQMNNLKTEDTAVYYCVRHGNFGNSYISYWAYWGQGTLVTVS |
| | | | SGGGGSGGGGSGGGGSQTVVTQEPSLTVSPGGTVTLTCGSSTGAVTS |
| | | | GNYPNWVQQKPGQAPRGLIGGTKFLAPGTPARFSGSLLGGKAALTLS |
| | | | GVQPEDEAEYYCVLWYSNRWVFGGGTKLTVLGGGGDKTHTCPPCPAP |
| | | | ELLGGPSVFLFPPKPKDTLMISRTPEVTCVVVDVSHEDPEVKFNWYV |
| | | | DGVEVHNAKTKPCEEQYGSTYRCVSVLTVLHQDWLNGKEYKCKVSNK |
| | | | ALPAPIEKTISKAKGQPREPQVYTLPPSREEMTKNQVSLTCLVKGFY |
| | | | PSDIAVEWESNGQPENNYKTTPPVLDSDGSFFLYSKLTVDKSRWQQG |
| | | | NVFSCSVMHEALHNHYTQKSLSLSPGKGGGGSGGGGSGGGGSGGGGS |
| | | | GGGGSGGGGSDKTHTCPPCPAPELLGGPSVFLFPPKPKDTLMISRTP |
| | | | EVTCVVVDVSHEDPEVKFNWYVDGVEVHNAKTKPCEEQYGSTYRCVS |
| | | | VLTVLHQDWLNGKEYKCKVSNKALPAPIEKTISKAKGQPREPQVYTL |
| | | | PPSREEMTKNQVSLTCLVKGFYPSDIAVEWESNGQPENNYKTTPPVL |
| | | | DSDGSFFLYSKLTVDKSRWQQGNVFSCSVMHEALHNHYTQKSLSLSP |
| | | | GK |
| 405. | FL_6_CCxCD | VH | QVTLKESGPVLVKPTQTLTLTCTFSGFSLSNARMGVSWIRQPPGKCL |
| | 3-scFc | | EWLAHIFSNDEKSFSTSLKNRLTISKDTSKSQVVLTMTNMDPVDTAT |
| | | | YYCARMVGYGSGWYAYFDYWGQGTQVTVSS |
| 406. | FL_6_CCxCD | VL | DIQMTQSPSSLSASVGDRVTITCRASQSISSYLNWYQQKPGKAPKLL |
| | 3-scFc | | IYAASSLQSGVPSRFSGSGSGTDFTLTISSLQPEDFATYYCLQHNSY |
| | | | PLTFGCGTKVEIK |
| 407. | FL_6_CCxCD | scFv | QVTLKESGPVLVKPTQTLTLTCTFSGFSLSNARMGVSWIRQPPGKCL |
| | 3-scFc | | EWLAHIFSNDEKSFSTSLKNRLTISKDTSKSQVVLTMTNMDPVDTAT |
| | | | YYCARMVGYGSGWYAYFDYWGQGTQVTVSSGGGGSGGGGSGGGGSDI |
| | | | QMTQSPSSLSASVGDRVTITCRASQSISSYLNWYQQKPGKAPKLLIY |
| | | | AASSLQSGVPSRFSGSGSGTDFTLTISSLQPEDFATYYCLQHNSYPL |
| | | | TFGCGTKVEIKS |
| 408. | FL_6_CCxCD | Bispecific | QVTLKESGPVLVKPTQTLTLTCTFSGFSLSNARMGVSWIRQPPGKCL |
| | 3-scFc | molecule | EWLAHIFSNDEKSFSTSLKNRLTISKDTSKSQVVLTMTNMDPVDTAT |
| | | | YYCARMVGYGSGWYAYFDYWGQGTQVTVSSGGGGSGGGGSGGGGSDI |
| | | | QMTQSPSSLSASVGDRVTITCRASQSISSYLNWYQQKPGKAPKLLIY |
| | | | AASSLQSGVPSRFSGSGSGTDFTLTISSLQPEDFATYYCLQHNSYPL |
| | | | TFGCGTKVEIKSGGGGSEVQLVESGGGLVQPGGSLKLSCAASGFTFN |
| | | | KYAMNWVRQAPGKGLEWVARIRSKYNNYATYYADSVKDRFTISRDDS |
| | | | KNTAYLQMNNLKTEDTAVYYCVRHGNFGNSYISYWAYWGQGTLVTVS |
| | | | SGGGGSGGGGSGGGGSQTVVTQEPSLTVSPGGTVTLTCGSSTGAVTS |
| | | | GNYPNWVQQKPGQAPRGLIGGTKFLAPGTPARFSGSLLGGKAALTLS |
| | | | GVQPEDEAEYYCVLWYSNRWVFGGGTKLTVL |
| 409. | FL_6_CCxCD | Bispecific | QVTLKESGPVLVKPTQTLTLTCTFSGFSLSNARMGVSWIRQPPGKCL |
| | 3-scFc | HLE | EWLAHIFSNDEKSFSTSLKNRLTISKDTSKSQVVLTMTNMDPVDTAT |
| | | molecule | YYCARMVGYGSGWYAYFDYWGQGTQVTVSSGGGGSGGGGSGGGGSDI |
| | | | QMTQSPSSLSASVGDRVTITCRASQSISSYLNWYQQKPGKAPKLLIY |
| | | | AASSLQSGVPSRFSGSGSGTDFTLTISSLQPEDFATYYCLQHNSYPL |
| | | | TFGCGTKVEIKSGGGGSEVQLVESGGGLVQPGGSLKLSCAASGFTFN |
| | | | KYAMNWVRQAPGKGLEWVARIRSKYNNYATYYADSVKDRFTISRDDS |
| | | | KNTAYLQMNNLKTEDTAVYYCVRHGNFGNSYISYWAYWGQGTLVTVS |
| | | | SGGGGSGGGGSGGGGSQTVVTQEPSLTVSPGGTVTLTCGSSTGAVTS |
| | | | GNYPNWVQQKPGQAPRGLIGGTKFLAPGTPARFSGSLLGGKAALTLS |
| | | | GVQPEDEAEYYCVLWYSNRWVFGGGTKLTVLGGGGDKTHTCPPCPAP |
| | | | ELLGGPSVFLFPPKPKDTLMISRTPEVTCVVVDVSHEDPEVKFNWYV |
| | | | DGVEVHNAKTKPCEEQYGSTYRCVSVLTVLHQDWLNGKEYKCKVSNK |
| | | | ALPAPIEKTISKAKGQPREPQVYTLPPSREEMTKNQVSLTCLVKGFY |
| | | | PSDIAVEWESNGQPENNYKTTPPVLDSDGSFFLYSKLTVDKSRWQQG |
| | | | NVFSCSVMHEALHNHYTQKSLSLSPGKGGGGSGGGGSGGGGSGGGGS |
| | | | GGGGSGGGGSDKTHTCPPCPAPELLGGPSVFLFPPKPKDTLMISRTP |
| | | | EVTCVVVDVSHEDPEVKFNWYVDGVEVHNAKTKPCEEQYGSTYRCVS |
| | | | VLTVLHQDWLNGKEYKCKVSNKALPAPIEKTISKAKGQPREPQVYTL |
| | | | PPSREEMTKNQVSLTCLVKGFYPSDIAVEWESNGQPENNYKTTPPVL |
| | | | DSDGSFFLYSKLTVDKSRWQQGNVFSCSVMHEALHNHYTQKSLSLSP |
| | | | GK |
| 410. | FL_7xCD3- | VH CDR1 | NARMGVS |
| | scFc | | |
| 411. | FL_7xCD3- | VH CDR2 | HIFSNDEKSYSTSLKN |
| | scFc | | |
| 412. | FL_7xCD3- | VH CDR3 | IVGYGTGWFGYFDY |
| | scFc | | |
| 413. | FL_7xCD3- | VL CDR1 | RASQDIRTDLA |
| | scFc | | |
| 414. | FL_7xCD3- | VL CDR2 | AASSLQS |
| | scFc | | |
| 415. | FL_7xCD3- | VL CDR3 | LQHNRYPLT |
| | scFc | | |
| 416. | FL_7xCD3- | VH | QVTLKESGPTLVKPTETLTLTCTVSGFSLNNARMGVSWIRQPPGKAL |
| | scFc | | EWLAHIFSNDEKSYSTSLKNRLTISKDSSKTQVVLTMTNVDPVDTAT |
| | | | YYCARIVGYGTGWFGYFDYWGQGTQVTVSS |
| 417. | FL_7xCD3- | VL | DIQMTQSPSSLSASVGDRVTITCRASQDIRTDLAWYQQKPGKAPKRL |
| | scFc | | IYAASSLQSGVPSRFSGSGSGTEFTLTISSLQPEDFATYYCLQHNRY |
| | | | PLTFGGGTKVDIK |
| 418. | FL_7xCD3- | scFv | QVTLKESGPTLVKPTETLTLTCTVSGFSLNNARMGVSWIRQPPGKAL |
| | scFc | | EWLAHIFSNDEKSYSTSLKNRLTISKDSSKTQVVLTMTNVDPVDTAT |
| | | | YYCARIVGYGTGWFGYFDYWGQGTQVTVSSGGGGSGGGGSGGGGSDI |
| | | | QMTQSPSSLSASVGDRVTITCRASQDIRTDLAWYQQKPGKAPKRLIY |
| | | | AASSLQSGVPSRFSGSGSGTEFTLTISSLQPEDFATYYCLQHNRYPL |
| | | | TFGGGTKVDIKS |
| 419. | FL_7xCD3- | Bispecific | QVTLKESGPTLVKPTETLTLTCTVSGFSLNNARMGVSWIRQPPGKAL |
| | scFc | molecule | EWLAHIFSNDEKSYSTSLKNRLTISKDSSKTQVVLTMTNVDPVDTAT |
| | | | YYCARIVGYGTGWFGYFDYWGQGTQVTVSSGGGGSGGGGSGGGGSDI |
| | | | QMTQSPSSLSASVGDRVTITCRASQDIRTDLAWYQQKPGKAPKRLIY |
| | | | AASSLQSGVPSRFSGSGSGTEFTLTISSLQPEDFATYYCLQHNRYPL |
| | | | TFGGGTKVDIKSGGGGSEVQLVESGGGLVQPGGSLKLSCAASGFTFN |
| | | | KYAMNWVRQAPGKGLEWVARIRSKYNNYATYYADSVKDRFTISRDDS |
| | | | KNTAYLQMNNLKTEDTAVYYCVRHGNFGNSYISYWAYWGQGTLVTVS |
| | | | SGGGGSGGGGSGGGGSQTVVTQEPSLTVSPGGTVTLTCGSSTGAVTS |
| | | | GNYPNWVQQKPGQAPRGLIGGTKFLAPGTPARFSGSLLGGKAALTLS |
| | | | GVQPEDEAEYYCVLWYSNRWVFGGGTKLTVL |
| 420. | FL_7xCD3- | Bispecific | QVTLKESGPTLVKPTETLTLTCTVSGFSLNNARMGVSWIRQPPGKAL |
| | scFc | HLE | EWLAHIFSNDEKSYSTSLKNRLTISKDSSKTQVVLTMTNVDPVDTAT |
| | | molecule | YYCARIVGYGTGWFGYFDYWGQGTQVTVSSGGGGSGGGGSGGGGSDI |
| | | | QMTQSPSSLSASVGDRVTITCRASQDIRTDLAWYQQKPGKAPKRLIY |
| | | | AASSLQSGVPSRFSGSGSGTEFTLTISSLQPEDFATYYCLQHNRYPL |
| | | | TFGGGTKVDIKSGGGGSEVQLVESGGGLVQPGGSLKLSCAASGFTFN |
| | | | KYAMNWVRQAPGKGLEWVARIRSKYNNYATYYADSVKDRFTISRDDS |
| | | | KNTAYLQMNNLKTEDTAVYYCVRHGNFGNSYISYWAYWGQGTLVTVS |
| | | | SGGGGSGGGGSGGGGSQTVVTQEPSLTVSPGGTVTLTCGSSTGAVTS |
| | | | GNYPNWVQQKPGQAPRGLIGGTKFLAPGTPARFSGSLLGGKAALTLS |
| | | | GVQPEDEAEYYCVLWYSNRWVFGGGTKLTVLGGGGDKTHTCPPCPAP |
| | | | ELLGGPSVFLFPPKPKDTLMISRTPEVTCVVVDVSHEDPEVKFNWYV |
| | | | DGVEVHNAKTKPCEEQYGSTYRCVSVLTVLHQDWLNGKEYKCKVSNK |
| | | | ALPAPIEKTISKAKGQPREPQVYTLPPSREEMTKNQVSLTCLVKGFY |
| | | | PSDIAVEWESNGQPENNYKTTPPVLDSDGSFFLYSKLTVDKSRWQQG |
| | | | NVFSCSVMHEALHNHYTQKSLSLSPGKGGGGSGGGGSGGGGSGGGGS |
| | | | GGGGSGGGGSDKTHTCPPCPAPELLGGPSVFLFPPKPKDTLMISRTP |
| | | | EVTCVVVDVSHEDPEVKFNWYVDGVEVHNAKTKPCEEQYGSTYRCVS |
| | | | VLTVLHQDWLNGKEYKCKVSNKALPAPIEKTISKAKGQPREPQVYTL |
| | | | PPSREEMTKNQVSLTCLVKGFYPSDIAVEWESNGQPENNYKTTPPVL |
| | | | DSDGSFFLYSKLTVDKSRWQQGNVFSCSVMHEALHNHYTQKSLSLSP |
| | | | GK |
| 421. | FL_7_CCxCD | VH | QVTLKESGPTLVKPTETLTLTCTVSGFSLNNARMGVSWIRQPPGKCL |
| | 3-scFc | | EWLAHIFSNDEKSYSTSLKNRLTISKDSSKTQVVLTMTNVDPVDTAT |
| | | | YYCARIVGYGTGWFGYFDYWGQGTQVTVSS |
| 422. | FL_7_CCxCD | VL | DIQMTQSPSSLSASVGDRVTITCRASQDIRTDLAWYQQKPGKAPKRL |
| | 3-scFc | | IYAASSLQSGVPSRFSGSGSGTEFTLTISSLQPEDFATYYCLQHNRY |
| | | | PLTFGCGTKVDIK |
| 423. | FL_7_CCxCD | scFv | QVTLKESGPTLVKPTETLTLTCTVSGFSLNNARMGVSWIRQPPGKCL |
| | 3-scFc | | EWLAHIFSNDEKSYSTSLKNRLTISKDSSKTQVVLTMTNVDPVDTAT |
| | | | YYCARIVGYGTGWFGYFDYWGQGTQVTVSSGGGGSGGGGSGGGGSDI |
| | | | QMTQSPSSLSASVGDRVTITCRASQDIRTDLAWYQQKPGKAPKRLIY |
| | | | AASSLQSGVPSRFSGSGSGTEFTLTISSLQPEDFATYYCLQHNRYPL |
| | | | TFGCGTKVDIKS |
| 424. | FL_7_CCxCD | Bispecific | QVTLKESGPTLVKPTETLTLTCTVSGFSLNNARMGVSWIRQPPGKCL |
| | 3-scFc | molecule | EWLAHIFSNDEKSYSTSLKNRLTISKDSSKTQVVLTMTNVDPVDTAT |
| | | | YYCARIVGYGTGWFGYFDYWGQGTQVTVSSGGGGSGGGGSGGGGSDI |
| | | | QMTQSPSSLSASVGDRVTITCRASQDIRTDLAWYQQKPGKAPKRLIY |
| | | | AASSLQSGVPSRFSGSGSGTEFTLTISSLQPEDFATYYCLQHNRYPL |
| | | | TFGCGTKVDIKSGGGGSEVQLVESGGGLVQPGGSLKLSCAASGFTFN |
| | | | KYAMNWVRQAPGKGLEWVARIRSKYNNYATYYADSVKDRFTISRDDS |
| | | | KNTAYLQMNNLKTEDTAVYYCVRHGNFGNSYISYWAYWGQGTLVTVS |
| | | | SGGGGSGGGGSGGGGSQTVVTQEPSLTVSPGGTVTLTCGSSTGAVTS |
| | | | GNYPNWVQQKPGQAPRGLIGGTKFLAPGTPARFSGSLLGGKAALTLS |
| | | | GVQPEDEAEYYCVLWYSNRWVFGGGTKLTVL |
| 425. | FL_7_CCxCD | Bispecific | QVTLKESGPTLVKPTETLTLTCTVSGFSLNNARMGVSWIRQPPGKCL |
| | 3-scFc | HLE | EWLAHIFSNDEKSYSTSLKNRLTISKDSSKTQVVLTMTNVDPVDTAT |
| | | molecule | YYCARIVGYGTGWFGYFDYWGQGTQVTVSSGGGGSGGGGSGGGGSDI |
| | | | QMTQSPSSLSASVGDRVTITCRASQDIRTDLAWYQQKPGKAPKRLIY |
| | | | AASSLQSGVPSRFSGSGSGTEFTLTISSLQPEDFATYYCLQHNRYPL |
| | | | TFGCGTKVDIKSGGGGSEVQLVESGGGLVQPGGSLKLSCAASGFTFN |
| | | | KYAMNWVRQAPGKGLEWVARIRSKYNNYATYYADSVKDRFTISRDDS |
| | | | KNTAYLQMNNLKTEDTAVYYCVRHGNFGNSYISYWAYWGQGTLVTVS |
| | | | SGGGGSGGGGSGGGGSQTVVTQEPSLTVSPGGTVTLTCGSSTGAVTS |
| | | | GNYPNWVQQKPGQAPRGLIGGTKFLAPGTPARFSGSLLGGKAALTLS |
| | | | GVQPEDEAEYYCVLWYSNRWVFGGGTKLTVLGGGGDKTHTCPPCPAP |
| | | | ELLGGPSVFLFPPKPKDTLMISRTPEVTCVVVDVSHEDPEVKFNWYV |
| | | | DGVEVHNAKTKPCEEQYGSTYRCVSVLTVLHQDWLNGKEYKCKVSNK |
| | | | ALPAPIEKTISKAKGQPREPQVYTLPPSREEMTKNQVSLTCLVKGFY |
| | | | PSDIAVEWESNGQPENNYKTTPPVLDSDGSFFLYSKLTVDKSRWQQG |
| | | | NVFSCSVMHEALHNHYTQKSLSLSPGKGGGGSGGGGSGGGGSGGGGS |
| | | | GGGGSGGGGSDKTHTCPPCPAPELLGGPSVFLFPPKPKDTLMISRTP |
| | | | EVTCVVVDVSHEDPEVKFNWYVDGVEVHNAKTKPCEEQYGSTYRCVS |
| | | | VLTVLHQDWLNGKEYKCKVSNKALPAPIEKTISKAKGQPREPQVYTL |
| | | | PPSREEMTKNQVSLTCLVKGFYPSDIAVEWESNGQPENNYKTTPPVL |
| | | | DSDGSFFLYSKLTVDKSRWQQGNVFSCSVMHEALHNHYTQKSLSLSP |
| | | | GK |
| 426. | FL_8xCD3- | VH CDR1 | NARMAVS |
| | scFc | | |
| 427. | FL_8xCD3- | VH CDR2 | HIFSNDEKSYSTSLKS |
| | scFc | | |
| 428. | FL_8xCD3- | VH CDR3 | IVGYGTGWYGFFDY |
| | scFc | | |
| 429. | FL_8xCD3- | VL CDR1 | RASQGIRNDLA |
| | scFc | | |
| 430. | FL_8xCD3- | VL CDR2 | AASSLQS |
| | scFc | | |
| 431. | FL_8xCD3- | VL CDR3 | LQHNSYPLT |
| | scFc | | |
| 432. | FL_8xCD3- | VH | QVTLKESGPALVKPTETLTLTCTLSGFSLNNARMAVSWIRQPPGKTL |
| | scFc | | EWLAHIFSNDEKSYSTSLKSRLTISKDTSKSQVVLTMTNMDPEDTAT |
| | | | YYCARIVGYGTGWYGFFDYWGQGILVTVSS |
| 433. | FL_8xCD3- | VL | DIQMTQSPSSLSASVGDRVTITCRASQGIRNDLAWYQQKPGKAPKRL |
| | scFc | | IYAASSLQSGVPSRFSGSGSGTEFTLTISSLQPEDFATYYCLQHNSY |
| | | | PLTFGGGTKVEIK |
| 434. | FL_8xCD3- | scFv | QVTLKESGPALVKPTETLTLTCTLSGFSLNNARMAVSWIRQPPGKTL |
| | scFc | | EWLAHIFSNDEKSYSTSLKSRLTISKDTSKSQVVLTMTNMDPEDTAT |
| | | | YYCARIVGYGTGWYGFFDYWGQGILVTVSSGGGGSGGGGSGGGGSDI |
| | | | QMTQSPSSLSASVGDRVTITCRASQGIRNDLAWYQQKPGKAPKRLIY |
| | | | AASSLQSGVPSRFSGSGSGTEFTLTISSLQPEDFATYYCLQHNSYPL |
| | | | TFGGGTKVEIKS |
| 435. | FL_8xCD3- | Bispecific | QVTLKESGPALVKPTETLTLTCTLSGFSLNNARMAVSWIRQPPGKTL |
| | scFc | molecule | EWLAHIFSNDEKSYSTSLKSRLTISKDTSKSQVVLTMTNMDPEDTAT |
| | | | YYCARIVGYGTGWYGFFDYWGQGILVTVSSGGGGSGGGGSGGGGSDI |
| | | | QMTQSPSSLSASVGDRVTITCRASQGIRNDLAWYQQKPGKAPKRLIY |
| | | | AASSLQSGVPSRFSGSGSGTEFTLTISSLQPEDFATYYCLQHNSYPL |
| | | | TFGGGTKVEIKSGGGGSEVQLVESGGGLVQPGGSLKLSCAASGFTFN |
| | | | KYAMNWVRQAPGKGLEWVARIRSKYNNYATYYADSVKDRFTISRDDS |
| | | | KNTAYLQMNNLKTEDTAVYYCVRHGNFGNSYISYWAYWGQGTLVTVS |
| | | | SGGGGSGGGGSGGGGSQTVVTQEPSLTVSPGGTVTLTCGSSTGAVTS |
| | | | GNYPNWVQQKPGQAPRGLIGGTKFLAPGTPARFSGSLLGGKAALTLS |
| | | | GVQPEDEAEYYCVLWYSNRWVFGGGTKLTVL |
| 436. | FL_8xCD3- | Bispecific | QVTLKESGPALVKPTETLTLTCTLSGFSLNNARMAVSWIRQPPGKTL |
| | scFc | HLE | EWLAHIFSNDEKSYSTSLKSRLTISKDTSKSQVVLTMTNMDPEDTAT |
| | | molecule | YYCARIVGYGTGWYGFFDYWGQGILVTVSSGGGGSGGGGSGGGGSDI |
| | | | QMTQSPSSLSASVGDRVTITCRASQGIRNDLAWYQQKPGKAPKRLIY |
| | | | AASSLQSGVPSRFSGSGSGTEFTLTISSLQPEDFATYYCLQHNSYPL |
| | | | TFGGGTKVEIKSGGGGSEVQLVESGGGLVQPGGSLKLSCAASGFTFN |
| | | | KYAMNWVRQAPGKGLEWVARIRSKYNNYATYYADSVKDRFTISRDDS |
| | | | KNTAYLQMNNLKTEDTAVYYCVRHGNFGNSYISYWAYWGQGTLVTVS |
| | | | SGGGGSGGGGSGGGGSQTVVTQEPSLTVSPGGTVTLTCGSSTGAVTS |
| | | | GNYPNWVQQKPGQAPRGLIGGTKFLAPGTPARFSGSLLGGKAALTLS |
| | | | GVQPEDEAEYYCVLWYSNRWVFGGGTKLTVLGGGGDKTHTCPPCPAP |
| | | | ELLGGPSVFLFPPKPKDTLMISRTPEVTCVVVDVSHEDPEVKFNWYV |
| | | | DGVEVHNAKTKPCEEQYGSTYRCVSVLTVLHQDWLNGKEYKCKVSNK |
| | | | ALPAPIEKTISKAKGQPREPQVYTLPPSREEMTKNQVSLTCLVKGFY |
| | | | PSDIAVEWESNGQPENNYKTTPPVLDSDGSFFLYSKLTVDKSRWQQG |
| | | | NVFSCSVMHEALHNHYTQKSLSLSPGKGGGGSGGGGSGGGGSGGGGS |
| | | | GGGGSGGGGSDKTHTCPPCPAPELLGGPSVFLFPPKPKDTLMISRTP |
| | | | EVTCVVVDVSHEDPEVKFNWYVDGVEVHNAKTKPCEEQYGSTYRCVS |
| | | | VLTVLHQDWLNGKEYKCKVSNKALPAPIEKTISKAKGQPREPQVYTL |
| | | | PPSREEMTKNQVSLTCLVKGFYPSDIAVEWESNGQPENNYKTTPPVL |
| | | | DSDGSFFLYSKLTVDKSRWQQGNVFSCSVMHEALHNHYTQKSLSLSP |
| | | | GK |
| 437. | FL_B_CCxCD | VH | QVTLKESGPALVKPTETLTLTCTLSGFSLNNARMAVSWIRQPPGKCL |
| | 3-scFc | | EWLAHIFSNDEKSYSTSLKSRLTISKDTSKSQVVLTMTNMDPEDTAT |
| | | | YYCARIVGYGTGWYGFFDYWGQGILVTVSS |
| 438. | FL_B_CCxCD | VL | DIQMTQSPSSLSASVGDRVTITCRASQGIRNDLAWYQQKPGKAPKRL |
| | 3-scFc | | IYAASSLQSGVPSRFSGSGSGTEFTLTISSLQPEDFATYYCLQHNSY |
| | | | PLTFGCGTKVEIK |
| 439. | FL_B_CCxCD | scFv | QVTLKESGPALVKPTETLTLTCTLSGFSLNNARMAVSWIRQPPGKCL |
| | 3-scFc | | EWLAHIFSNDEKSYSTSLKSRLTISKDTSKSQVVLTMTNMDPEDTAT |
| | | | YYCARIVGYGTGWYGFFDYWGQGILVTVSSGGGGSGGGGSGGGGSDI |
| | | | QMTQSPSSLSASVGDRVTITCRASQGIRNDLAWYQQKPGKAPKRLIY |
| | | | AASSLQSGVPSRFSGSGSGTEFTLTISSLQPEDFATYYCLQHNSYPL |
| | | | TFGCGTKVEIKS |
| 440. | FL_B_CCxCD | Bispecific | QVTLKESGPALVKPTETLTLTCTLSGFSLNNARMAVSWIRQPPGKCL |
| | 3-scFc | molecule | EWLAHIFSNDEKSYSTSLKSRLTISKDTSKSQVVLTMTNMDPEDTAT |
| | | | YYCARIVGYGTGWYGFFDYWGQGILVTVSSGGGGSGGGGSGGGGSDI |
| | | | QMTQSPSSLSASVGDRVTITCRASQGIRNDLAWYQQKPGKAPKRLIY |
| | | | AASSLQSGVPSRFSGSGSGTEFTLTISSLQPEDFATYYCLQHNSYPL |
| | | | TFGCGTKVEIKSGGGGSEVQLVESGGGLVQPGGSLKLSCAASGFTFN |
| | | | KYAMNWVRQAPGKGLEWVARIRSKYNNYATYYADSVKDRFTISRDDS |
| | | | KNTAYLQMNNLKTEDTAVYYCVRHGNFGNSYISYWAYWGQGTLVTVS |
| | | | SGGGGSGGGGSGGGGSQTVVTQEPSLTVSPGGTVTLTCGSSTGAVTS |
| | | | GNYPNWVQQKPGQAPRGLIGGTKFLAPGTPARFSGSLLGGKAALTLS |
| | | | GVQPEDEAEYYCVLWYSNRWVFGGGTKLTVL |
| 441. | FL_B_CCxCD | Bispecific | QVTLKESGPALVKPTETLTLTCTLSGFSLNNARMAVSWIRQPPGKCL |
| | 3-scFc | HLE | EWLAHIFSNDEKSYSTSLKSRLTISKDTSKSQVVLTMTNMDPEDTAT |
| | | molecule | YYCARIVGYGTGWYGFFDYWGQGILVTVSSGGGGSGGGGSGGGGSDI |
| | | | QMTQSPSSLSASVGDRVTITCRASQGIRNDLAWYQQKPGKAPKRLIY |
| | | | AASSLQSGVPSRFSGSGSGTEFTLTISSLQPEDFATYYCLQHNSYPL |
| | | | TFGCGTKVEIKSGGGGSEVQLVESGGGLVQPGGSLKLSCAASGFTFN |
| | | | KYAMNWVRQAPGKGLEWVARIRSKYNNYATYYADSVKDRFTISRDDS |
| | | | KNTAYLQMNNLKTEDTAVYYCVRHGNFGNSYISYWAYWGQGTLVTVS |
| | | | SGGGGSGGGGSGGGGSQTVVTQEPSLTVSPGGTVTLTCGSSTGAVTS |
| | | | GNYPNWVQQKPGQAPRGLIGGTKFLAPGTPARFSGSLLGGKAALTLS |
| | | | GVQPEDEAEYYCVLWYSNRWVFGGGTKLTVLGGGGDKTHTCPPCPAP |
| | | | ELLGGPSVFLFPPKPKDTLMISRTPEVTCVVVDVSHEDPEVKFNWYV |
| | | | DGVEVHNAKTKPCEEQYGSTYRCVSVLTVLHQDWLNGKEYKCKVSNK |
| | | | ALPAPIEKTISKAKGQPREPQVYTLPPSREEMTKNQVSLTCLVKGFY |
| | | | PSDIAVEWESNGQPENNYKTTPPVLDSDGSFFLYSKLTVDKSRWQQG |
| | | | NVFSCSVMHEALHNHYTQKSLSLSPGKGGGGSGGGGSGGGGSGGGGS |
| | | | GGGGSGGGGSDKTHTCPPCPAPELLGGPSVFLFPPKPKDTLMISRTP |
| | | | EVTCVVVDVSHEDPEVKFNWYVDGVEVHNAKTKPCEEQYGSTYRCVS |
| | | | VLTVLHQDWLNGKEYKCKVSNKALPAPIEKTISKAKGQPREPQVYTL |
| | | | PPSREEMTKNQVSLTCLVKGFYPSDIAVEWESNGQPENNYKTTPPVL |
| | | | DSDGSFFLYSKLTVDKSRWQQGNVFSCSVMHEALHNHYTQKSLSLSP |
| | | | GK |
| 442. | FL_9xCD3- | VH CDR1 | YARMGVS |
| | scFc | | |
| 443. | FL_9xCD3- | VH CDR2 | HIFSNDEKSYSTSLKS |
| | scFc | | |
| 444. | FL_9xCD3- | VH CDR3 | MPEYSSGWSGAFDI |
| | scFc | | |
| 445. | FL_9xCD3- | VL CDR1 | RASQDIRNDLA |
| | scFc | | |
| 446. | FL_9xCD3- | VL CDR2 | AASSLQS |
| | scFc | | |
| 447. | FL_9xCD3- | VL CDR3 | LQHNSYPLT |
| | scFc | | |
| 448. | FL_9xCD3- | VH | QVTLKESGPTLVKPTETLTLTCTFSGFSLRYARMGVSWIRQPPGKAL |
| | scFc | | EWLAHIFSNDEKSYSTSLKSRLTISKDTSKSQVVLTLTNMDPVDTAT |
| | | | YFCARMPEYSSGWSGAFDIWGQGTMVTVSS |
| 449. | FL_9xCD3- | VL | DIQMTQSPSSLSASVGDRVTITCRASQDIRNDLAWYQQKPGKAPKRL |
| | scFc | | IYAASSLQSGVPSRFSGSGSGTEFTLTISSLQPEDFATYYCLQHNSY |
| | | | PLTFGGGTKLEIK |
| 450. | FL_9xCD3- | scFv | QVTLKESGPTLVKPTETLTLTCTFSGFSLRYARMGVSWIRQPPGKAL |
| | scFc | | EWLAHIFSNDEKSYSTSLKSRLTISKDTSKSQVVLTLTNMDPVDTAT |
| | | | YFCARMPEYSSGWSGAFDIWGQGTMVTVSSGGGGSGGGGSGGGGSDI |
| | | | QMTQSPSSLSASVGDRVTITCRASQDIRNDLAWYQQKPGKAPKRLIY |
| | | | AASSLQSGVPSRFSGSGSGTEFTLTISSLQPEDFATYYCLQHNSYPL |
| | | | TFGGGTKLEIKS |
| 451. | FL_9xCD3- | Bispecific | QVTLKESGPTLVKPTETLTLTCTFSGFSLRYARMGVSWIRQPPGKAL |
| | scFc | molecule | EWLAHIFSNDEKSYSTSLKSRLTISKDTSKSQVVLTLTNMDPVDTAT |
| | | | YFCARMPEYSSGWSGAFDIWGQGTMVTVSSGGGGSGGGGSGGGGSDI |
| | | | QMTQSPSSLSASVGDRVTITCRASQDIRNDLAWYQQKPGKAPKRLIY |
| | | | AASSLQSGVPSRFSGSGSGTEFTLTISSLQPEDFATYYCLQHNSYPL |
| | | | TFGGGTKLEIKSGGGGSEVQLVESGGGLVQPGGSLKLSCAASGFTFN |
| | | | KYAMNWVRQAPGKGLEWVARIRSKYNNYATYYADSVKDRFTISRDDS |
| | | | KNTAYLQMNNLKTEDTAVYYCVRHGNFGNSYISYWAYWGQGTLVTVS |
| | | | SGGGGSGGGGSGGGGSQTVVTQEPSLTVSPGGTVTLTCGSSTGAVTS |
| | | | GNYPNWVQQKPGQAPRGLIGGTKFLAPGTPARFSGSLLGGKAALTLS |
| | | | GVQPEDEAEYYCVLWYSNRWVFGGGTKLTVL |
| 452. | FL_9xCD3- | Bispecific | QVTLKESGPTLVKPTETLTLTCTFSGFSLRYARMGVSWIRQPPGKAL |
| | scFc | HLE | EWLAHIFSNDEKSYSTSLKSRLTISKDTSKSQVVLTLTNMDPVDTAT |
| | | molecule | YFCARMPEYSSGWSGAFDIWGQGTMVTVSSGGGGSGGGGSGGGGSDI |
| | | | QMTQSPSSLSASVGDRVTITCRASQDIRNDLAWYQQKPGKAPKRLIY |
| | | | AASSLQSGVPSRFSGSGSGTEFTLTISSLQPEDFATYYCLQHNSYPL |
| | | | TFGGGTKLEIKSGGGGSEVQLVESGGGLVQPGGSLKLSCAASGFTFN |
| | | | KYAMNWVRQAPGKGLEWVARIRSKYNNYATYYADSVKDRFTISRDDS |
| | | | KNTAYLQMNNLKTEDTAVYYCVRHGNFGNSYISYWAYWGQGTLVTVS |
| | | | SGGGGSGGGGSGGGGSQTVVTQEPSLTVSPGGTVTLTCGSSTGAVTS |
| | | | GNYPNWVQQKPGQAPRGLIGGTKFLAPGTPARFSGSLLGGKAALTLS |
| | | | GVQPEDEAEYYCVLWYSNRWVFGGGTKLTVLGGGGDKTHTCPPCPAP |
| | | | ELLGGPSVFLFPPKPKDTLMISRTPEVTCVVVDVSHEDPEVKFNWYV |
| | | | DGVEVHNAKTKPCEEQYGSTYRCVSVLTVLHQDWLNGKEYKCKVSNK |
| | | | ALPAPIEKTISKAKGQPREPQVYTLPPSREEMTKNQVSLTCLVKGFY |
| | | | PSDIAVEWESNGQPENNYKTTPPVLDSDGSFFLYSKLTVDKSRWQQG |
| | | | NVFSCSVMHEALHNHYTQKSLSLSPGKGGGGSGGGGSGGGGSGGGGS |
| | | | GGGGSGGGGSDKTHTCPPCPAPELLGGPSVFLFPPKPKDTLMISRTP |
| | | | EVTCVVVDVSHEDPEVKFNWYVDGVEVHNAKTKPCEEQYGSTYRCVS |
| | | | VLTVLHQDWLNGKEYKCKVSNKALPAPIEKTISKAKGQPREPQVYTL |
| | | | PPSREEMTKNQVSLTCLVKGFYPSDIAVEWESNGQPENNYKTTPPVL |
| | | | DSDGSFFLYSKLTVDKSRWQQGNVFSCSVMHEALHNHYTQKSLSLSP |
| | | | GK |
| 453. | FL_9_CCxCD | VH | QVTLKESGPTLVKPTETLTLTCTFSGFSLRYARMGVSWIRQPPGKCL |
| | 3-scFc | | EWLAHIFSNDEKSYSTSLKSRLTISKDTSKSQVVLTLTNMDPVDTAT |
| | | | YFCARMPEYSSGWSGAFDIWGQGTMVTVSS |
| 454. | FL_9_CCxCD | VL | DIQMTQSPSSLSASVGDRVTITCRASQDIRNDLAWYQQKPGKAPKRL |
| | 3-scFc | | IYAASSLQSGVPSRFSGSGSGTEFTLTISSLQPEDFATYYCLQHNSY |
| | | | PLTFGCGTKLEIK |
| 455. | FL_9_CCxCD | scFv | QVTLKESGPTLVKPTETLTLTCTFSGFSLRYARMGVSWIRQPPGKCL |
| | 3-scFc | | EWLAHIFSNDEKSYSTSLKSRLTISKDTSKSQVVLTLTNMDPVDTAT |
| | | | YFCARMPEYSSGWSGAFDIWGQGTMVTVSSGGGGSGGGGSGGGGSDI |
| | | | QMTQSPSSLSASVGDRVTITCRASQDIRNDLAWYQQKPGKAPKRLIY |
| | | | AASSLQSGVPSRFSGSGSGTEFTLTISSLQPEDFATYYCLQHNSYPL |
| | | | TFGCGTKLEIKS |
| 456. | FL_9_CCxCD | Bispecific | QVTLKESGPTLVKPTETLTLTCTFSGFSLRYARMGVSWIRQPPGKCL |
| | 3-scFc | molecule | EWLAHIFSNDEKSYSTSLKSRLTISKDTSKSQVVLTLTNMDPVDTAT |
| | | | YFCARMPEYSSGWSGAFDIWGQGTMVTVSSGGGGSGGGGSGGGGSDI |
| | | | QMTQSPSSLSASVGDRVTITCRASQDIRNDLAWYQQKPGKAPKRLIY |
| | | | AASSLQSGVPSRFSGSGSGTEFTLTISSLQPEDFATYYCLQHNSYPL |
| | | | TFGCGTKLEIKSGGGGSEVQLVESGGGLVQPGGSLKLSCAASGFTFN |
| | | | KYAMNWVRQAPGKGLEWVARIRSKYNNYATYYADSVKDRFTISRDDS |
| | | | KNTAYLQMNNLKTEDTAVYYCVRHGNFGNSYISYWAYWGQGTLVTVS |
| | | | SGGGGSGGGGSGGGGSQTVVTQEPSLTVSPGGTVTLTCGSSTGAVTS |
| | | | GNYPNWVQQKPGQAPRGLIGGTKFLAPGTPARFSGSLLGGKAALTLS |
| | | | GVQPEDEAEYYCVLWYSNRWVFGGGTKLTVL |
| 457. | FL_9_CCxCD | Bispecific | QVTLKESGPTLVKPTETLTLTCTFSGFSLRYARMGVSWIRQPPGKCL |
| | 3-scFc | HLE | EWLAHIFSNDEKSYSTSLKSRLTISKDTSKSQVVLTLTNMDPVDTAT |
| | | molecule | YFCARMPEYSSGWSGAFDIWGQGTMVTVSSGGGGSGGGGSGGGGSDI |
| | | | QMTQSPSSLSASVGDRVTITCRASQDIRNDLAWYQQKPGKAPKRLIY |
| | | | AASSLQSGVPSRFSGSGSGTEFTLTISSLQPEDFATYYCLQHNSYPL |
| | | | TFGCGTKLEIKSGGGGSEVQLVESGGGLVQPGGSLKLSCAASGFTFN |
| | | | KYAMNWVRQAPGKGLEWVARIRSKYNNYATYYADSVKDRFTISRDDS |
| | | | KNTAYLQMNNLKTEDTAVYYCVRHGNFGNSYISYWAYWGQGTLVTVS |
| | | | SGGGGSGGGGSGGGGSQTVVTQEPSLTVSPGGTVTLTCGSSTGAVTS |
| | | | GNYPNWVQQKPGQAPRGLIGGTKFLAPGTPARFSGSLLGGKAALTLS |
| | | | GVQPEDEAEYYCVLWYSNRWVFGGGTKLTVLGGGGDKTHTCPPCPAP |
| | | | ELLGGPSVFLFPPKPKDTLMISRTPEVTCVVVDVSHEDPEVKFNWYV |
| | | | DGVEVHNAKTKPCEEQYGSTYRCVSVLTVLHQDWLNGKEYKCKVSNK |
| | | | ALPAPIEKTISKAKGQPREPQVYTLPPSREEMTKNQVSLTCLVKGFY |
| | | | PSDIAVEWESNGQPENNYKTTPPVLDSDGSFFLYSKLTVDKSRWQQG |
| | | | NVFSCSVMHEALHNHYTQKSLSLSPGKGGGGSGGGGSGGGGSGGGGS |
| | | | GGGGSGGGGSDKTHTCPPCPAPELLGGPSVFLFPPKPKDTLMISRTP |
| | | | EVTCVVVDVSHEDPEVKFNWYVDGVEVHNAKTKPCEEQYGSTYRCVS |
| | | | VLTVLHQDWLNGKEYKCKVSNKALPAPIEKTISKAKGQPREPQVYTL |
| | | | PPSREEMTKNQVSLTCLVKGFYPSDIAVEWESNGQPENNYKTTPPVL |
| | | | DSDGSFFLYSKLTVDKSRWQQGNVFSCSVMHEALHNHYTQKSLSLSP |
| | | | GK |
| 458. | FL_10xCD3- | VH CDR1 | NARMGVS |
| | scFc | | |
| 459. | FL_10xCD3- | VH CDR2 | HIFSNDEKSYSTSLKS |
| | scFc | | |
| 460. | FL_10xCD3- | VH CDR3 | MPEYSSGWSGAFDI |
| | scFc | | |
| 461. | FL_10xCD3- | VL CDR1 | RASQDIRDDLG |
| | scFc | | |
| 462. | FL_10xCD3- | VL CDR2 | GASTLQS |
| | scFc | | |
| 463. | FL_10xCD3- | VL CDR3 | LQHNSYPLT |
| | scFc | | |
| 464. | FL_10xCD3- | VH | QVTLKESGPVLVKPTETLTLTCTVSGFSFRNARMGVSWIRQPPGKAL |
| | scFc | | EWLAHIFSNDEKSYSTSLKSRLTISKDTSKSQVVLTLTNMDPVDTAT |
| | | | YFCARMPEYSSGWSGAFDIWGQGTMVTVSS |
| 465. | FL_10xCD3- | VL | DIQMTQSPSSLSASVGDRVTITCRASQDIRDDLGWYQQKPGNAPKRL |
| | scFc | | IYGASTLQSGVPSRFSGSGSGTEFTLTISSLQPEDFATYYCLQHNSY |
| | | | PLTFGGGTKVDIK |
| 466. | FL_10xCD3- | scFv | QVTLKESGPVLVKPTETLTLTCTVSGFSFRNARMGVSWIRQPPGKAL |
| | scFc | | EWLAHIFSNDEKSYSTSLKSRLTISKDTSKSQVVLTLTNMDPVDTAT |
| | | | YFCARMPEYSSGWSGAFDIWGQGTMVTVSSGGGGSGGGGSGGGGSDI |
| | | | QMTQSPSSLSASVGDRVTITCRASQDIRDDLGWYQQKPGNAPKRLIY |
| | | | GASTLQSGVPSRFSGSGSGTEFTLTISSLQPEDFATYYCLQHNSYPL |
| | | | TFGGGTKVDIKS |
| 467. | FL_10xCD3- | Bispecific | QVTLKESGPVLVKPTETLTLTCTVSGFSFRNARMGVSWIRQPPGKAL |
| | scFc | molecule | EWLAHIFSNDEKSYSTSLKSRLTISKDTSKSQVVLTLTNMDPVDTAT |
| | | | YFCARMPEYSSGWSGAFDIWGQGTMVTVSSGGGGSGGGGSGGGGSDI |
| | | | QMTQSPSSLSASVGDRVTITCRASQDIRDDLGWYQQKPGNAPKRLIY |
| | | | GASTLQSGVPSRFSGSGSGTEFTLTISSLQPEDFATYYCLQHNSYPL |
| | | | TFGGGTKVDIKSGGGGSEVQLVESGGGLVQPGGSLKLSCAASGFTFN |
| | | | KYAMNWVRQAPGKGLEWVARIRSKYNNYATYYADSVKDRFTISRDDS |
| | | | KNTAYLQMNNLKTEDTAVYYCVRHGNFGNSYISYWAYWGQGTLVTVS |
| | | | SGGGGSGGGGSGGGGSQTVVTQEPSLTVSPGGTVTLTCGSSTGAVTS |
| | | | GNYPNWVQQKPGQAPRGLIGGTKFLAPGTPARFSGSLLGGKAALTLS |
| | | | GVQPEDEAEYYCVLWYSNRWVFGGGTKLTVL |
| 468. | FL_10xCD3- | Bispecific | QVTLKESGPVLVKPTETLTLTCTVSGFSFRNARMGVSWIRQPPGKAL |
| | scFc | HLE | EWLAHIFSNDEKSYSTSLKSRLTISKDTSKSQVVLTLTNMDPVDTAT |
| | | molecule | YFCARMPEYSSGWSGAFDIWGQGTMVTVSSGGGGSGGGGSGGGGSDI |
| | | | QMTQSPSSLSASVGDRVTITCRASQDIRDDLGWYQQKPGNAPKRLIY |
| | | | GASTLQSGVPSRFSGSGSGTEFTLTISSLQPEDFATYYCLQHNSYPL |
| | | | TFGGGTKVDIKSGGGGSEVQLVESGGGLVQPGGSLKLSCAASGFTFN |
| | | | KYAMNWVRQAPGKGLEWVARIRSKYNNYATYYADSVKDRFTISRDDS |
| | | | KNTAYLQMNNLKTEDTAVYYCVRHGNFGNSYISYWAYWGQGTLVTVS |
| | | | SGGGGSGGGGSGGGGSQTVVTQEPSLTVSPGGTVTLTCGSSTGAVTS |
| | | | GNYPNWVQQKPGQAPRGLIGGTKFLAPGTPARFSGSLLGGKAALTLS |
| | | | GVQPEDEAEYYCVLWYSNRWVFGGGTKLTVLGGGGDKTHTCPPCPAP |
| | | | ELLGGPSVFLFPPKPKDTLMISRTPEVTCVVVDVSHEDPEVKFNWYV |
| | | | DGVEVHNAKTKPCEEQYGSTYRCVSVLTVLHQDWLNGKEYKCKVSNK |
| | | | ALPAPIEKTISKAKGQPREPQVYTLPPSREEMTKNQVSLTCLVKGFY |
| | | | PSDIAVEWESNGQPENNYKTTPPVLDSDGSFFLYSKLTVDKSRWQQG |
| | | | NVFSCSVMHEALHNHYTQKSLSLSPGKGGGGSGGGGSGGGGSGGGGS |
| | | | GGGGSGGGGSDKTHTCPPCPAPELLGGPSVFLFPPKPKDTLMISRTP |
| | | | EVTCVVVDVSHEDPEVKFNWYVDGVEVHNAKTKPCEEQYGSTYRCVS |
| | | | VLTVLHQDWLNGKEYKCKVSNKALPAPIEKTISKAKGQPREPQVYTL |
| | | | PPSREEMTKNQVSLTCLVKGFYPSDIAVEWESNGQPENNYKTTPPVL |
| | | | DSDGSFFLYSKLTVDKSRWQQGNVFSCSVMHEALHNHYTQKSLSLSP |
| | | | GK |
| 469. | FL_10_CCxC | VH | QVTLKESGPVLVKPTETLTLTCTVSGFSFRNARMGVSWIRQPPGKCL |
| | D3-scFc | | EWLAHIFSNDEKSYSTSLKSRLTISKDTSKSQVVLTLTNMDPVDTAT |
| | | | YFCARMPEYSSGWSGAFDIWGQGTMVTVSS |
| 470. | FL_10_CCxC | VL | DIQMTQSPSSLSASVGDRVTITCRASQDIRDDLGWYQQKPGNAPKRL |
| | D3-scFc | | IYGASTLQSGVPSRFSGSGSGTEFTLTISSLQPEDFATYYCLQHNSY |
| | | | PLTFGCGTKVDIK |
| 471. | FL_10_CCxC | scFv | QVTLKESGPVLVKPTETLTLTCTVSGFSFRNARMGVSWIRQPPGKCL |
| | D3-scFc | | EWLAHIFSNDEKSYSTSLKSRLTISKDTSKSQVVLTLTNMDPVDTAT |
| | | | YFCARMPEYSSGWSGAFDIWGQGTMVTVSSGGGGSGGGGSGGGGSDI |
| | | | QMTQSPSSLSASVGDRVTITCRASQDIRDDLGWYQQKPGNAPKRLIY |
| | | | GASTLQSGVPSRFSGSGSGTEFTLTISSLQPEDFATYYCLQHNSYPL |
| | | | TFGCGTKVDIKS |
| 472. | FL_10_CCxC | Bispecific | QVTLKESGPVLVKPTETLTLTCTVSGFSFRNARMGVSWIRQPPGKCL |
| | D3-scFc | molecule | EWLAHIFSNDEKSYSTSLKSRLTISKDTSKSQVVLTLTNMDPVDTAT |
| | | | YFCARMPEYSSGWSGAFDIWGQGTMVTVSSGGGGSGGGGSGGGGSDI |
| | | | QMTQSPSSLSASVGDRVTITCRASQDIRDDLGWYQQKPGNAPKRLIY |
| | | | GASTLQSGVPSRFSGSGSGTEFTLTISSLQPEDFATYYCLQHNSYPL |
| | | | TFGCGTKVDIKSGGGGSEVQLVESGGGLVQPGGSLKLSCAASGFTFN |
| | | | KYAMNWVRQAPGKGLEWVARIRSKYNNYATYYADSVKDRFTISRDDS |
| | | | KNTAYLQMNNLKTEDTAVYYCVRHGNFGNSYISYWAYWGQGTLVTVS |
| | | | SGGGGSGGGGSGGGGSQTVVTQEPSLTVSPGGTVTLTCGSSTGAVTS |
| | | | GNYPNWVQQKPGQAPRGLIGGTKFLAPGTPARFSGSLLGGKAALTLS |
| | | | GVQPEDEAEYYCVLWYSNRWVFGGGTKLTVL |
| 473. | FL_10_CCxC | Bispecific | QVTLKESGPVLVKPTETLTLTCTVSGFSFRNARMGVSWIRQPPGKCL |
| | D3-scFc | HLE | EWLAHIFSNDEKSYSTSLKSRLTISKDTSKSQVVLTLTNMDPVDTAT |
| | | molecule | YFCARMPEYSSGWSGAFDIWGQGTMVTVSSGGGGSGGGGSGGGGSDI |
| | | | QMTQSPSSLSASVGDRVTITCRASQDIRDDLGWYQQKPGNAPKRLIY |
| | | | GASTLQSGVPSRFSGSGSGTEFTLTISSLQPEDFATYYCLQHNSYPL |
| | | | TFGCGTKVDIKSGGGGSEVQLVESGGGLVQPGGSLKLSCAASGFTFN |
| | | | KYAMNWVRQAPGKGLEWVARIRSKYNNYATYYADSVKDRFTISRDDS |
| | | | KNTAYLQMNNLKTEDTAVYYCVRHGNFGNSYISYWAYWGQGTLVTVS |
| | | | SGGGGSGGGGSGGGGSQTVVTQEPSLTVSPGGTVTLTCGSSTGAVTS |
| | | | GNYPNWVQQKPGQAPRGLIGGTKFLAPGTPARFSGSLLGGKAALTLS |
| | | | GVQPEDEAEYYCVLWYSNRWVFGGGTKLTVLGGGGDKTHTCPPCPAP |
| | | | ELLGGPSVFLFPPKPKDTLMISRTPEVTCVVVDVSHEDPEVKFNWYV |
| | | | DGVEVHNAKTKPCEEQYGSTYRCVSVLTVLHQDWLNGKEYKCKVSNK |
| | | | ALPAPIEKTISKAKGQPREPQVYTLPPSREEMTKNQVSLTCLVKGFY |
| | | | PSDIAVEWESNGQPENNYKTTPPVLDSDGSFFLYSKLTVDKSRWQQG |
| | | | NVFSCSVMHEALHNHYTQKSLSLSPGKGGGGSGGGGSGGGGSGGGGS |
| | | | GGGGSGGGGSDKTHTCPPCPAPELLGGPSVFLFPPKPKDTLMISRTP |
| | | | EVTCVVVDVSHEDPEVKFNWYVDGVEVHNAKTKPCEEQYGSTYRCVS |
| | | | VLTVLHQDWLNGKEYKCKVSNKALPAPIEKTISKAKGQPREPQVYTL |
| | | | PPSREEMTKNQVSLTCLVKGFYPSDIAVEWESNGQPENNYKTTPPVL |
| | | | DSDGSFFLYSKLTVDKSRWQQGNVFSCSVMHEALHNHYTQKSLSLSP |
| | | | GK |
| 474. | FL_11xCD3- | VH CDR1 | NARMGVS |
| | scFc | | |
| 475. | FL_11xCD3- | VH CDR2 | HIFSNDEKSYSTSLKS |
| | scFc | | |
| 476. | FL_11xCD3- | VH CDR3 | MPEYSSGWSGAFDI |
| | scFc | | |
| 477. | FL_11xCD3- | VL CDR1 | RASQDIGYDLG |
| | scFc | | |
| 478. | FL_11xCD3- | VL CDR2 | AASTLQS |
| | scFc | | |
| 479. | FL_11xCD3- | VL CDR3 | LQHNSFPWT |
| | scFc | | |
| 480. | FL_11xCD3- | VH | QVTLKESGPALVKPTETLTLTCTVSGFSFRNARMGVSWIRQPPGKAL |
| | scFc | | EWLAHIFSNDEKSYSTSLKSRLTISKDTSKSQVVLTLTNMDPVDTAT |
| | | | YFCARMPEYSSGWSGAFDIWGQGTMVTVSS |
| 481. | FL_11xCD3- | VL | DIQMTQSPSSLSASVGDRVTITCRASQDIGYDLGWYQQKPGKAPKRL |
| | scFc | | IYAASTLQSGVPSRFSGSGSGTEFTLIISSLQPEDFATYYCLQHNSF |
| | | | PWTFGQGTKVEIK |
| 482. | FL_11xCD3- | scFv | QVTLKESGPALVKPTETLTLTCTVSGFSFRNARMGVSWIRQPPGKAL |
| | scFc | | EWLAHIFSNDEKSYSTSLKSRLTISKDTSKSQVVLTLTNMDPVDTAT |
| | | | YFCARMPEYSSGWSGAFDIWGQGTMVTVSSGGGGSGGGGSGGGGSDI |
| | | | QMTQSPSSLSASVGDRVTITCRASQDIGYDLGWYQQKPGKAPKRLIY |
| | | | AASTLQSGVPSRFSGSGSGTEFTLIISSLQPEDFATYYCLQHNSFPW |
| | | | TFGQGTKVEIKS |
| 483. | FL_11xCD3- | Bispecific | QVTLKESGPALVKPTETLTLTCTVSGFSFRNARMGVSWIRQPPGKAL |
| | scFc | molecule | EWLAHIFSNDEKSYSTSLKSRLTISKDTSKSQVVLTLTNMDPVDTAT |
| | | | YFCARMPEYSSGWSGAFDIWGQGTMVTVSSGGGGSGGGGSGGGGSDI |
| | | | QMTQSPSSLSASVGDRVTITCRASQDIGYDLGWYQQKPGKAPKRLIY |
| | | | AASTLQSGVPSRFSGSGSGTEFTLIISSLQPEDFATYYCLQHNSFPW |
| | | | TFGQGTKVEIKSGGGGSEVQLVESGGGLVQPGGSLKLSCAASGFTFN |
| | | | KYAMNWVRQAPGKGLEWVARIRSKYNNYATYYADSVKDRFTISRDDS |
| | | | KNTAYLQMNNLKTEDTAVYYCVRHGNFGNSYISYWAYWGQGTLVTVS |
| | | | SGGGGSGGGGSGGGGSQTVVTQEPSLTVSPGGTVTLTCGSSTGAVTS |
| | | | GNYPNWVQQKPGQAPRGLIGGTKFLAPGTPARFSGSLLGGKAALTLS |
| | | | GVQPEDEAEYYCVLWYSNRWVFGGGTKLTVL |
| 484. | FL_11xCD3- | Bispecific | QVTLKESGPALVKPTETLTLTCTVSGFSFRNARMGVSWIRQPPGKAL |
| | scFc | HLE | EWLAHIFSNDEKSYSTSLKSRLTISKDTSKSQVVLTLTNMDPVDTAT |
| | | molecule | YFCARMPEYSSGWSGAFDIWGQGTMVTVSSGGGGSGGGGSGGGGSDI |
| | | | QMTQSPSSLSASVGDRVTITCRASQDIGYDLGWYQQKPGKAPKRLIY |
| | | | AASTLQSGVPSRFSGSGSGTEFTLIISSLQPEDFATYYCLQHNSFPW |
| | | | TFGQGTKVEIKSGGGGSEVQLVESGGGLVQPGGSLKLSCAASGFTFN |
| | | | KYAMNWVRQAPGKGLEWVARIRSKYNNYATYYADSVKDRFTISRDDS |
| | | | KNTAYLQMNNLKTEDTAVYYCVRHGNFGNSYISYWAYWGQGTLVTVS |
| | | | SGGGGSGGGGSGGGGSQTVVTQEPSLTVSPGGTVTLTCGSSTGAVTS |
| | | | GNYPNWVQQKPGQAPRGLIGGTKFLAPGTPARFSGSLLGGKAALTLS |
| | | | GVQPEDEAEYYCVLWYSNRWVFGGGTKLTVLGGGGDKTHTCPPCPAP |
| | | | ELLGGPSVFLFPPKPKDTLMISRTPEVTCVVVDVSHEDPEVKFNWYV |
| | | | DGVEVHNAKTKPCEEQYGSTYRCVSVLTVLHQDWLNGKEYKCKVSNK |
| | | | ALPAPIEKTISKAKGQPREPQVYTLPPSREEMTKNQVSLTCLVKGFY |
| | | | PSDIAVEWESNGQPENNYKTTPPVLDSDGSFFLYSKLTVDKSRWQQG |
| | | | NVFSCSVMHEALHNHYTQKSLSLSPGKGGGGSGGGGSGGGGSGGGGS |
| | | | GGGGSGGGGSDKTHTCPPCPAPELLGGPSVFLFPPKPKDTLMISRTP |
| | | | EVTCVVVDVSHEDPEVKFNWYVDGVEVHNAKTKPCEEQYGSTYRCVS |
| | | | VLTVLHQDWLNGKEYKCKVSNKALPAPIEKTISKAKGQPREPQVYTL |
| | | | PPSREEMTKNQVSLTCLVKGFYPSDIAVEWESNGQPENNYKTTPPVL |
| | | | DSDGSFFLYSKLTVDKSRWQQGNVFSCSVMHEALHNHYTQKSLSLSP |
| | | | GK |
| 485. | FL_11_CCxC | VH | QVTLKESGPALVKPTETLTLTCTVSGFSFRNARMGVSWIRQPPGKCL |
| | D3-scFc | | EWLAHIFSNDEKSYSTSLKSRLTISKDTSKSQVVLTLTNMDPVDTAT |
| | | | YFCARMPEYSSGWSGAFDIWGQGTMVTVSS |
| 486. | FL_11_CCxC | VL | DIQMTQSPSSLSASVGDRVTITCRASQDIGYDLGWYQQKPGKAPKRL |
| | D3-scFc | | IYAASTLQSGVPSRFSGSGSGTEFTLIISSLQPEDFATYYCLQHNSF |
| | | | PWTFGCGTKVEIK |
| 487. | FL_11_CCxC | scFv | QVTLKESGPALVKPTETLTLTCTVSGFSFRNARMGVSWIRQPPGKCL |
| | D3-scFc | | EWLAHIFSNDEKSYSTSLKSRLTISKDTSKSQVVLTLTNMDPVDTAT |
| | | | YFCARMPEYSSGWSGAFDIWGQGTMVTVSSGGGGSGGGGSGGGGSDI |
| | | | QMTQSPSSLSASVGDRVTITCRASQDIGYDLGWYQQKPGKAPKRLIY |
| | | | AASTLQSGVPSRFSGSGSGTEFTLIISSLQPEDFATYYCLQHNSFPW |
| | | | TFGCGTKVEIKS |
| 488. | FL_11_CCxC | Bispecific | QVTLKESGPALVKPTETLTLTCTVSGFSFRNARMGVSWIRQPPGKCL |
| | D3-scFc | molecule | EWLAHIFSNDEKSYSTSLKSRLTISKDTSKSQVVLTLTNMDPVDTAT |
| | | | YFCARMPEYSSGWSGAFDIWGQGTMVTVSSGGGGSGGGGSGGGGSDI |
| | | | QMTQSPSSLSASVGDRVTITCRASQDIGYDLGWYQQKPGKAPKRLIY |
| | | | AASTLQSGVPSRFSGSGSGTEFTLIISSLQPEDFATYYCLQHNSFPW |
| | | | TFGCGTKVEIKSGGGGSEVQLVESGGGLVQPGGSLKLSCAASGFTFN |
| | | | KYAMNWVRQAPGKGLEWVARIRSKYNNYATYYADSVKDRFTISRDDS |
| | | | KNTAYLQMNNLKTEDTAVYYCVRHGNFGNSYISYWAYWGQGTLVTVS |
| | | | SGGGGSGGGGSGGGGSQTVVTQEPSLTVSPGGTVTLTCGSSTGAVTS |
| | | | GNYPNWVQQKPGQAPRGLIGGTKFLAPGTPARFSGSLLGGKAALTLS |
| | | | GVQPEDEAEYYCVLWYSNRWVFGGGTKLTVL |
| 489. | FL_11_CCxC | Bispecific | QVTLKESGPALVKPTETLTLTCTVSGFSFRNARMGVSWIRQPPGKCL |
| | D3-scFc | HLE | EWLAHIFSNDEKSYSTSLKSRLTISKDTSKSQVVLTLTNMDPVDTAT |
| | | molecule | YFCARMPEYSSGWSGAFDIWGQGTMVTVSSGGGGSGGGGSGGGGSDI |
| | | | QMTQSPSSLSASVGDRVTITCRASQDIGYDLGWYQQKPGKAPKRLIY |
| | | | AASTLQSGVPSRFSGSGSGTEFTLIISSLQPEDFATYYCLQHNSFPW |
| | | | TFGCGTKVEIKSGGGGSEVQLVESGGGLVQPGGSLKLSCAASGFTFN |
| | | | KYAMNWVRQAPGKGLEWVARIRSKYNNYATYYADSVKDRFTISRDDS |
| | | | KNTAYLQMNNLKTEDTAVYYCVRHGNFGNSYISYWAYWGQGTLVTVS |
| | | | SGGGGSGGGGSGGGGSQTVVTQEPSLTVSPGGTVTLTCGSSTGAVTS |
| | | | GNYPNWVQQKPGQAPRGLIGGTKFLAPGTPARFSGSLLGGKAALTLS |
| | | | GVQPEDEAEYYCVLWYSNRWVFGGGTKLTVLGGGGDKTHTCPPCPAP |
| | | | ELLGGPSVFLFPPKPKDTLMISRTPEVTCVVVDVSHEDPEVKFNWYV |
| | | | DGVEVHNAKTKPCEEQYGSTYRCVSVLTVLHQDWLNGKEYKCKVSNK |
| | | | ALPAPIEKTISKAKGQPREPQVYTLPPSREEMTKNQVSLTCLVKGFY |
| | | | PSDIAVEWESNGQPENNYKTTPPVLDSDGSFFLYSKLTVDKSRWQQG |
| | | | NVFSCSVMHEALHNHYTQKSLSLSPGKGGGGSGGGGSGGGGSGGGGS |
| | | | GGGGSGGGGSDKTHTCPPCPAPELLGGPSVFLFPPKPKDTLMISRTP |
| | | | EVTCVVVDVSHEDPEVKFNWYVDGVEVHNAKTKPCEEQYGSTYRCVS |
| | | | VLTVLHQDWLNGKEYKCKVSNKALPAPIEKTISKAKGQPREPQVYTL |
| | | | PPSREEMTKNQVSLTCLVKGFYPSDIAVEWESNGQPENNYKTTPPVL |
| | | | DSDGSFFLYSKLTVDKSRWQQGNVFSCSVMHEALHNHYTQKSLSLSP |
| | | | GK |
| 490. | FL_12xCD3- | VH CDR1 | NARMGVS |
| | scFc | | |
| 491. | FL_12xCD3- | VH CDR2 | HIFSNDEKSYRTSLKS |
| | scFc | | |
| 492. | FL_12xCD3- | VH CDR3 | IVGYGSGWYAYFDY |
| | scFc | | |
| 493. | FL_12xCD3- | VL CDR1 | RASQGIRNDLG |
| | scFc | | |
| 494. | FL_12xCD3- | VL CDR2 | AASSLQS |
| | scFc | | |
| 495. | FL_12xCD3- | VL CDR3 | LQHNSYPLT |
| | scFc | | |
| 496. | FL_12xCD3- | VH | QVTLKESGPALVKPTQTLTLTCTFSGFSLSNARMGVSWIRQPPGKAL |
| | scFc | | EWLAHIFSNDEKSYRTSLKSRLTISKDTSKSQVVLTMTNMDPVDTAT |
| | | | YYCARIVGYGSGWYAYFDYWGQGTLVTVSS |
| 497. | FL_12xCD3- | VL | DIQMTQSPSSLSASVGDRVTITCRASQGIRNDLGWYQQKPGKAPKRL |
| | scFc | | IYAASSLQSGVPSRFSGSGSGTEFTLTISSLQPEDFATYYCLQHNSY |
| | | | PLTFGGGTKVEIK |
| 498. | FL_12xCD3- | scFv | QVTLKESGPALVKPTQTLTLTCTFSGFSLSNARMGVSWIRQPPGKAL |
| | scFc | | EWLAHIFSNDEKSYRTSLKSRLTISKDTSKSQVVLTMTNMDPVDTAT |
| | | | YYCARIVGYGSGWYAYFDYWGQGTLVTVSSGGGGSGGGGSGGGGSDI |
| | | | QMTQSPSSLSASVGDRVTITCRASQGIRNDLGWYQQKPGKAPKRLIY |
| | | | AASSLQSGVPSRFSGSGSGTEFTLTISSLQPEDFATYYCLQHNSYPL |
| | | | TFGGGTKVEIKS |
| 499. | FL_12xCD3- | Bispecific | QVTLKESGPALVKPTQTLTLTCTFSGFSLSNARMGVSWIRQPPGKAL |
| | scFc | molecule | EWLAHIFSNDEKSYRTSLKSRLTISKDTSKSQVVLTMTNMDPVDTAT |
| | | | YYCARIVGYGSGWYAYFDYWGQGTLVTVSSGGGGSGGGGSGGGGSDI |
| | | | QMTQSPSSLSASVGDRVTITCRASQGIRNDLGWYQQKPGKAPKRLIY |
| | | | AASSLQSGVPSRFSGSGSGTEFTLTISSLQPEDFATYYCLQHNSYPL |
| | | | TFGGGTKVEIKSGGGGSEVQLVESGGGLVQPGGSLKLSCAASGFTFN |
| | | | KYAMNWVRQAPGKGLEWVARIRSKYNNYATYYADSVKDRFTISRDDS |
| | | | KNTAYLQMNNLKTEDTAVYYCVRHGNFGNSYISYWAYWGQGTLVTVS |
| | | | SGGGGSGGGGSGGGGSQTVVTQEPSLTVSPGGTVTLTCGSSTGAVTS |
| | | | GNYPNWVQQKPGQAPRGLIGGTKFLAPGTPARFSGSLLGGKAALTLS |
| | | | GVQPEDEAEYYCVLWYSNRWVFGGGTKLTVL |
| 500. | FL_12xCD3- | Bispecific | QVTLKESGPALVKPTQTLTLTCTFSGFSLSNARMGVSWIRQPPGKAL |
| | scFc | HLE | EWLAHIFSNDEKSYRTSLKSRLTISKDTSKSQVVLTMTNMDPVDTAT |
| | | molecule | YYCARIVGYGSGWYAYFDYWGQGTLVTVSSGGGGSGGGGSGGGGSDI |
| | | | QMTQSPSSLSASVGDRVTITCRASQGIRNDLGWYQQKPGKAPKRLIY |
| | | | AASSLQSGVPSRFSGSGSGTEFTLTISSLQPEDFATYYCLQHNSYPL |
| | | | TFGGGTKVEIKSGGGGSEVQLVESGGGLVQPGGSLKLSCAASGFTFN |
| | | | KYAMNWVRQAPGKGLEWVARIRSKYNNYATYYADSVKDRFTISRDDS |
| | | | KNTAYLQMNNLKTEDTAVYYCVRHGNFGNSYISYWAYWGQGTLVTVS |
| | | | SGGGGSGGGGSGGGGSQTVVTQEPSLTVSPGGTVTLTCGSSTGAVTS |
| | | | GNYPNWVQQKPGQAPRGLIGGTKFLAPGTPARFSGSLLGGKAALTLS |
| | | | GVQPEDEAEYYCVLWYSNRWVFGGGTKLTVLGGGGDKTHTCPPCPAP |
| | | | ELLGGPSVFLFPPKPKDTLMISRTPEVTCVVVDVSHEDPEVKFNWYV |
| | | | DGVEVHNAKTKPCEEQYGSTYRCVSVLTVLHQDWLNGKEYKCKVSNK |
| | | | ALPAPIEKTISKAKGQPREPQVYTLPPSREEMTKNQVSLTCLVKGFY |
| | | | PSDIAVEWESNGQPENNYKTTPPVLDSDGSFFLYSKLTVDKSRWQQG |
| | | | NVFSCSVMHEALHNHYTQKSLSLSPGKGGGGSGGGGSGGGGSGGGGS |
| | | | GGGGSGGGGSDKTHTCPPCPAPELLGGPSVFLFPPKPKDTLMISRTP |
| | | | EVTCVVVDVSHEDPEVKFNWYVDGVEVHNAKTKPCEEQYGSTYRCVS |
| | | | VLTVLHQDWLNGKEYKCKVSNKALPAPIEKTISKAKGQPREPQVYTL |
| | | | PPSREEMTKNQVSLTCLVKGFYPSDIAVEWESNGQPENNYKTTPPVL |
| | | | DSDGSFFLYSKLTVDKSRWQQGNVFSCSVMHEALHNHYTQKSLSLSP |
| | | | GK |
| 501. | FL_12_CCxC | VH | QVTLKESGPALVKPTQTLTLTCTFSGFSLSNARMGVSWIRQPPGKCL |
| | D3-scFc | | EWLAHIFSNDEKSYRTSLKSRLTISKDTSKSQVVLTMTNMDPVDTAT |
| | | | YYCARIVGYGSGWYAYFDYWGQGTLVTVSS |
| 502. | FL_12_CCxC | VL | DIQMTQSPSSLSASVGDRVTITCRASQGIRNDLGWYQQKPGKAPKRL |
| | D3-scFc | | IYAASSLQSGVPSRFSGSGSGTEFTLTISSLQPEDFATYYCLQHNSY |
| | | | PLTFGCGTKVEIK |
| 503. | FL_12_CCxC | scFv | QVTLKESGPALVKPTQTLTLTCTFSGFSLSNARMGVSWIRQPPGKCL |
| | D3-scFc | | EWLAHIFSNDEKSYRTSLKSRLTISKDTSKSQVVLTMTNMDPVDTAT |
| | | | YYCARIVGYGSGWYAYFDYWGQGTLVTVSSGGGGSGGGGSGGGGSDI |
| | | | QMTQSPSSLSASVGDRVTITCRASQGIRNDLGWYQQKPGKAPKRLIY |
| | | | AASSLQSGVPSRFSGSGSGTEFTLTISSLQPEDFATYYCLQHNSYPL |
| | | | TFGCGTKVEIKS |
| 504. | FL_12_CCxC | Bispecific | QVTLKESGPALVKPTQTLTLTCTFSGFSLSNARMGVSWIRQPPGKCL |
| | D3-scFc | molecule | EWLAHIFSNDEKSYRTSLKSRLTISKDTSKSQVVLTMTNMDPVDTAT |
| | | | YYCARIVGYGSGWYAYFDYWGQGTLVTVSSGGGGSGGGGSGGGGSDI |
| | | | QMTQSPSSLSASVGDRVTITCRASQGIRNDLGWYQQKPGKAPKRLIY |
| | | | AASSLQSGVPSRFSGSGSGTEFTLTISSLQPEDFATYYCLQHNSYPL |
| | | | TFGCGTKVEIKSGGGGSEVQLVESGGGLVQPGGSLKLSCAASGFTFN |
| | | | KYAMNWVRQAPGKGLEWVARIRSKYNNYATYYADSVKDRFTISRDDS |
| | | | KNTAYLQMNNLKTEDTAVYYCVRHGNFGNSYISYWAYWGQGTLVTVS |
| | | | SGGGGSGGGGSGGGGSQTVVTQEPSLTVSPGGTVTLTCGSSTGAVTS |
| | | | GNYPNWVQQKPGQAPRGLIGGTKFLAPGTPARFSGSLLGGKAALTLS |
| | | | GVQPEDEAEYYCVLWYSNRWVFGGGTKLTVL |
| 505. | FL_12_CCxC | Bispecific | QVTLKESGPALVKPTQTLTLTCTFSGFSLSNARMGVSWIRQPPGKCL |
| | D3-scFc | HLE | EWLAHIFSNDEKSYRTSLKSRLTISKDTSKSQVVLTMTNMDPVDTAT |
| | | molecule | YYCARIVGYGSGWYAYFDYWGQGTLVTVSSGGGGSGGGGSGGGGSDI |
| | | | QMTQSPSSLSASVGDRVTITCRASQGIRNDLGWYQQKPGKAPKRLIY |
| | | | AASSLQSGVPSRFSGSGSGTEFTLTISSLQPEDFATYYCLQHNSYPL |
| | | | TFGCGTKVEIKSGGGGSEVQLVESGGGLVQPGGSLKLSCAASGFTFN |
| | | | KYAMNWVRQAPGKGLEWVARIRSKYNNYATYYADSVKDRFTISRDDS |
| | | | KNTAYLQMNNLKTEDTAVYYCVRHGNFGNSYISYWAYWGQGTLVTVS |
| | | | SGGGGSGGGGSGGGGSQTVVTQEPSLTVSPGGTVTLTCGSSTGAVTS |
| | | | GNYPNWVQQKPGQAPRGLIGGTKFLAPGTPARFSGSLLGGKAALTLS |
| | | | GVQPEDEAEYYCVLWYSNRWVFGGGTKLTVLGGGGDKTHTCPPCPAP |
| | | | ELLGGPSVFLFPPKPKDTLMISRTPEVTCVVVDVSHEDPEVKFNWYV |
| | | | DGVEVHNAKTKPCEEQYGSTYRCVSVLTVLHQDWLNGKEYKCKVSNK |
| | | | ALPAPIEKTISKAKGQPREPQVYTLPPSREEMTKNQVSLTCLVKGFY |
| | | | PSDIAVEWESNGQPENNYKTTPPVLDSDGSFFLYSKLTVDKSRWQQG |
| | | | NVFSCSVMHEALHNHYTQKSLSLSPGKGGGGSGGGGSGGGGSGGGGS |
| | | | GGGGSGGGGSDKTHTCPPCPAPELLGGPSVFLFPPKPKDTLMISRTP |
| | | | EVTCVVVDVSHEDPEVKFNWYVDGVEVHNAKTKPCEEQYGSTYRCVS |
| | | | VLTVLHQDWLNGKEYKCKVSNKALPAPIEKTISKAKGQPREPQVYTL |
| | | | PPSREEMTKNQVSLTCLVKGFYPSDIAVEWESNGQPENNYKTTPPVL |
| | | | DSDGSFFLYSKLTVDKSRWQQGNVFSCSVMHEALHNHYTQKSLSLSP |
| | | | GK |
| 506. | FL_13xCD3- | VH CDR1 | NARMGVS |
| | scFc | | |
| 507. | FL_13xCD3- | VH CDR2 | LIYWNDDKRYSPSLKS |
| | scFc | | |
| 508. | FL_13xCD3- | VH CDR3 | MVGYGSGWYAYFDY |
| | scFc | | |
| 509. | FL_13xCD3- | VL CDR1 | RASQGIRNDLG |
| | scFc | | |
| 510. | FL_13xCD3- | VL CDR2 | AASSLQS |
| | scFc | | |
| 511. | FL_13xCD3- | VL CDR3 | LQHNSYPLT |
| | scFc | | |
| 512. | FL_13xCD3- | VH | QVTLKESGPVLVKPTQTLTLTCTFSGFSLSNARMGVSWIRQPPGKAL |
| | scFc | | EWLALIYWNDDKRYSPSLKSRLTITKDTSKNQVVLTMTNMDPVDTAT |
| | | | YYCARMVGYGSGWYAYFDYWGQGTLVTVSS |
| 513. | FL_13xCD3- | VL | DIQMTQSPSSLSASVGDRVTITCRASQGIRNDLGWYQQKPGKAPKRL |
| | scFc | | IYAASSLQSGVPSRFSGSGSGTEFTLTISSLQPEDFATYYCLQHNSY |
| | | | PLTFGGGTKVEIK |
| 514. | FL_13xCD3- | scFv | QVTLKESGPVLVKPTQTLTLTCTFSGFSLSNARMGVSWIRQPPGKAL |
| | scFc | | EWLALIYWNDDKRYSPSLKSRLTITKDTSKNQVVLTMTNMDPVDTAT |
| | | | YYCARMVGYGSGWYAYFDYWGQGTLVTVSSGGGGSGGGGSGGGGSDI |
| | | | QMTQSPSSLSASVGDRVTITCRASQGIRNDLGWYQQKPGKAPKRLIY |
| | | | AASSLQSGVPSRFSGSGSGTEFTLTISSLQPEDFATYYCLQHNSYPL |
| | | | TFGGGTKVEIKS |
| 515. | FL_13xCD3- | Bispecific | QVTLKESGPVLVKPTQTLTLTCTFSGFSLSNARMGVSWIRQPPGKAL |
| | scFc | molecule | EWLALIYWNDDKRYSPSLKSRLTITKDTSKNQVVLTMTNMDPVDTAT |
| | | | YYCARMVGYGSGWYAYFDYWGQGTLVTVSSGGGGSGGGGSGGGGSDI |
| | | | QMTQSPSSLSASVGDRVTITCRASQGIRNDLGWYQQKPGKAPKRLIY |
| | | | AASSLQSGVPSRFSGSGSGTEFTLTISSLQPEDFATYYCLQHNSYPL |
| | | | TFGGGTKVEIKSGGGGSEVQLVESGGGLVQPGGSLKLSCAASGFTFN |
| | | | KYAMNWVRQAPGKGLEWVARIRSKYNNYATYYADSVKDRFTISRDDS |
| | | | KNTAYLQMNNLKTEDTAVYYCVRHGNFGNSYISYWAYWGQGTLVTVS |
| | | | SGGGGSGGGGSGGGGSQTVVTQEPSLTVSPGGTVTLTCGSSTGAVTS |
| | | | GNYPNWVQQKPGQAPRGLIGGTKFLAPGTPARFSGSLLGGKAALTLS |
| | | | GVQPEDEAEYYCVLWYSNRWVFGGGTKLTVL |
| 516. | FL_13xCD3- | Bispecific | QVTLKESGPVLVKPTQTLTLTCTFSGFSLSNARMGVSWIRQPPGKAL |
| | scFc | HLE | EWLALIYWNDDKRYSPSLKSRLTITKDTSKNQVVLTMTNMDPVDTAT |
| | | molecule | YYCARMVGYGSGWYAYFDYWGQGTLVTVSSGGGGSGGGGSGGGGSDI |
| | | | QMTQSPSSLSASVGDRVTITCRASQGIRNDLGWYQQKPGKAPKRLIY |
| | | | AASSLQSGVPSRFSGSGSGTEFTLTISSLQPEDFATYYCLQHNSYPL |
| | | | TFGGGTKVEIKSGGGGSEVQLVESGGGLVQPGGSLKLSCAASGFTFN |
| | | | KYAMNWVRQAPGKGLEWVARIRSKYNNYATYYADSVKDRFTISRDDS |
| | | | KNTAYLQMNNLKTEDTAVYYCVRHGNFGNSYISYWAYWGQGTLVTVS |
| | | | SGGGGSGGGGSGGGGSQTVVTQEPSLTVSPGGTVTLTCGSSTGAVTS |
| | | | GNYPNWVQQKPGQAPRGLIGGTKFLAPGTPARFSGSLLGGKAALTLS |
| | | | GVQPEDEAEYYCVLWYSNRWVFGGGTKLTVLGGGGDKTHTCPPCPAP |
| | | | ELLGGPSVFLFPPKPKDTLMISRTPEVTCVVVDVSHEDPEVKFNWYV |
| | | | DGVEVHNAKTKPCEEQYGSTYRCVSVLTVLHQDWLNGKEYKCKVSNK |
| | | | ALPAPIEKTISKAKGQPREPQVYTLPPSREEMTKNQVSLTCLVKGFY |
| | | | PSDIAVEWESNGQPENNYKTTPPVLDSDGSFFLYSKLTVDKSRWQQG |
| | | | NVFSCSVMHEALHNHYTQKSLSLSPGKGGGGSGGGGSGGGGSGGGGS |
| | | | GGGGSGGGGSDKTHTCPPCPAPELLGGPSVFLFPPKPKDTLMISRTP |
| | | | EVTCVVVDVSHEDPEVKFNWYVDGVEVHNAKTKPCEEQYGSTYRCVS |
| | | | VLTVLHQDWLNGKEYKCKVSNKALPAPIEKTISKAKGQPREPQVYTL |
| | | | PPSREEMTKNQVSLTCLVKGFYPSDIAVEWESNGQPENNYKTTPPVL |
| | | | DSDGSFFLYSKLTVDKSRWQQGNVFSCSVMHEALHNHYTQKSLSLSP |
| | | | GK |
| 517. | FL_13_CCxC | VH | QVTLKESGPVLVKPTQTLTLTCTFSGFSLSNARMGVSWIRQPPGKCL |
| | D3-scFc | | EWLALIYWNDDKRYSPSLKSRLTITKDTSKNQVVLTMTNMDPVDTAT |
| | | | YYCARMVGYGSGWYAYFDYWGQGTLVTVSS |
| 518. | FL_13_CCxC | VL | DIQMTQSPSSLSASVGDRVTITCRASQGIRNDLGWYQQKPGKAPKRL |
| | D3-scFc | | IYAASSLQSGVPSRFSGSGSGTEFTLTISSLQPEDFATYYCLQHNSY |
| | | | PLTFGCGTKVEIK |
| 519. | FL_13_CCxC | scFv | QVTLKESGPVLVKPTQTLTLTCTFSGFSLSNARMGVSWIRQPPGKCL |
| | D3-scFc | | EWLALIYWNDDKRYSPSLKSRLTITKDTSKNQVVLTMTNMDPVDTAT |
| | | | YYCARMVGYGSGWYAYFDYWGQGTLVTVSSGGGGSGGGGSGGGGSDI |
| | | | QMTQSPSSLSASVGDRVTITCRASQGIRNDLGWYQQKPGKAPKRLIY |
| | | | AASSLQSGVPSRFSGSGSGTEFTLTISSLQPEDFATYYCLQHNSYPL |
| | | | TFGCGTKVEIKS |
| 520. | FL_13_CCxC | Bispecific | QVTLKESGPVLVKPTQTLTLTCTFSGFSLSNARMGVSWIRQPPGKCL |
| | D3-scFc | molecule | EWLALIYWNDDKRYSPSLKSRLTITKDTSKNQVVLTMTNMDPVDTAT |
| | | | YYCARMVGYGSGWYAYFDYWGQGTLVTVSSGGGGSGGGGSGGGGSDI |
| | | | QMTQSPSSLSASVGDRVTITCRASQGIRNDLGWYQQKPGKAPKRLIY |
| | | | AASSLQSGVPSRFSGSGSGTEFTLTISSLQPEDFATYYCLQHNSYPL |
| | | | TFGCGTKVEIKSGGGGSEVQLVESGGGLVQPGGSLKLSCAASGFTFN |
| | | | KYAMNWVRQAPGKGLEWVARIRSKYNNYATYYADSVKDRFTISRDDS |
| | | | KNTAYLQMNNLKTEDTAVYYCVRHGNFGNSYISYWAYWGQGTLVTVS |
| | | | SGGGGSGGGGSGGGGSQTVVTQEPSLTVSPGGTVTLTCGSSTGAVTS |
| | | | GNYPNWVQQKPGQAPRGLIGGTKFLAPGTPARFSGSLLGGKAALTLS |
| | | | GVQPEDEAEYYCVLWYSNRWVFGGGTKLTVL |
| 521. | FL_13_CCxC | Bispecific | QVTLKESGPVLVKPTQTLTLTCTFSGFSLSNARMGVSWIRQPPGKCL |
| | D3-scFc | HLE | EWLALIYWNDDKRYSPSLKSRLTITKDTSKNQVVLTMTNMDPVDTAT |
| | | molecule | YYCARMVGYGSGWYAYFDYWGQGTLVTVSSGGGGSGGGGSGGGGSDI |
| | | | QMTQSPSSLSASVGDRVTITCRASQGIRNDLGWYQQKPGKAPKRLIY |
| | | | AASSLQSGVPSRFSGSGSGTEFTLTISSLQPEDFATYYCLQHNSYPL |
| | | | TFGCGTKVEIKSGGGGSEVQLVESGGGLVQPGGSLKLSCAASGFTFN |
| | | | KYAMNWVRQAPGKGLEWVARIRSKYNNYATYYADSVKDRFTISRDDS |
| | | | KNTAYLQMNNLKTEDTAVYYCVRHGNFGNSYISYWAYWGQGTLVTVS |
| | | | SGGGGSGGGGSGGGGSQTVVTQEPSLTVSPGGTVTLTCGSSTGAVTS |
| | | | GNYPNWVQQKPGQAPRGLIGGTKFLAPGTPARFSGSLLGGKAALTLS |
| | | | GVQPEDEAEYYCVLWYSNRWVFGGGTKLTVLGGGGDKTHTCPPCPAP |
| | | | ELLGGPSVFLFPPKPKDTLMISRTPEVTCVVVDVSHEDPEVKFNWYV |
| | | | DGVEVHNAKTKPCEEQYGSTYRCVSVLTVLHQDWLNGKEYKCKVSNK |
| | | | ALPAPIEKTISKAKGQPREPQVYTLPPSREEMTKNQVSLTCLVKGFY |
| | | | PSDIAVEWESNGQPENNYKTTPPVLDSDGSFFLYSKLTVDKSRWQQG |
| | | | NVFSCSVMHEALHNHYTQKSLSLSPGKGGGGSGGGGSGGGGSGGGGS |
| | | | GGGGSGGGGSDKTHTCPPCPAPELLGGPSVFLFPPKPKDTLMISRTP |
| | | | EVTCVVVDVSHEDPEVKFNWYVDGVEVHNAKTKPCEEQYGSTYRCVS |
| | | | VLTVLHQDWLNGKEYKCKVSNKALPAPIEKTISKAKGQPREPQVYTL |
| | | | PPSREEMTKNQVSLTCLVKGFYPSDIAVEWESNGQPENNYKTTPPVL |
| | | | DSDGSFFLYSKLTVDKSRWQQGNVFSCSVMHEALHNHYTQKSLSLSP |
| | | | GK |
| 522. | FL_14xCD3- | VH CDR1 | NARMGVS |
| | scFc | | |
| 523. | FL_14xCD3- | VH CDR2 | HIFSNDEKSYSTSLKS |
| | scFc | | |
| 524. | FL_14xCD3- | VH CDR3 | IVGYGTGWYGFFDY |
| | scFc | | |
| 525. | FL_14xCD3- | VL CDR1 | RTSQGIRNDLG |
| | scFc | | |
| 526. | FL_14xCD3- | VL CDR2 | AASSLQS |
| | scFc | | |
| 527. | FL_14xCD3- | VL CDR3 | LQHNSYPLT |
| | scFc | | |
| 528. | FL_14xCD3- | VH | QVTLKESGPALVKPTQTLTLTCTFSGFSLSNARMGVSWIRQPPGKAL |
| | scFc | | EWLAHIFSNDEKSYSTSLKSRLTISKDTSKSQVVLTMTDMDPEDTAT |
| | | | YYCARIVGYGTGWYGFFDYWGQGILVTVSS |
| 529. | FL_14xCD3- | VL | DIQMTQSPSSLSASVGDRVTITCRTSQGIRNDLGWYQQKPGKAPKRL |
| | scFc | | IYAASSLQSGVPSRFSGSGSGTEFTLTISSLQPEDFATYYCLQHNSY |
| | | | PLTFGGGTKVEIK |
| 530. | FL_14xCD3- | scFv | QVTLKESGPALVKPTQTLTLTCTFSGFSLSNARMGVSWIRQPPGKAL |
| | scFc | | EWLAHIFSNDEKSYSTSLKSRLTISKDTSKSQVVLTMTDMDPEDTAT |
| | | | YYCARIVGYGTGWYGFFDYWGQGILVTVSSGGGGSGGGGSGGGGSDI |
| | | | QMTQSPSSLSASVGDRVTITCRTSQGIRNDLGWYQQKPGKAPKRLIY |
| | | | AASSLQSGVPSRFSGSGSGTEFTLTISSLQPEDFATYYCLQHNSYPL |
| | | | TFGGGTKVEIKS |
| 531. | FL_14xCD3- | Bispecific | QVTLKESGPALVKPTQTLTLTCTFSGFSLSNARMGVSWIRQPPGKAL |
| | scFc | molecule | EWLAHIFSNDEKSYSTSLKSRLTISKDTSKSQVVLTMTDMDPEDTAT |
| | | | YYCARIVGYGTGWYGFFDYWGQGILVTVSSGGGGSGGGGSGGGGSDI |
| | | | QMTQSPSSLSASVGDRVTITCRTSQGIRNDLGWYQQKPGKAPKRLIY |
| | | | AASSLQSGVPSRFSGSGSGTEFTLTISSLQPEDFATYYCLQHNSYPL |
| | | | TFGGGTKVEIKSGGGGSEVQLVESGGGLVQPGGSLKLSCAASGFTFN |
| | | | KYAMNWVRQAPGKGLEWVARIRSKYNNYATYYADSVKDRFTISRDDS |
| | | | KNTAYLQMNNLKTEDTAVYYCVRHGNFGNSYISYWAYWGQGTLVTVS |
| | | | SGGGGSGGGGSGGGGSQTVVTQEPSLTVSPGGTVTLTCGSSTGAVTS |
| | | | GNYPNWVQQKPGQAPRGLIGGTKFLAPGTPARFSGSLLGGKAALTLS |
| | | | GVQPEDEAEYYCVLWYSNRWVFGGGTKLTVL |
| 532. | FL_14xCD3- | Bispecific | QVTLKESGPALVKPTQTLTLTCTFSGFSLSNARMGVSWIRQPPGKAL |
| | scFc | HLE | EWLAHIFSNDEKSYSTSLKSRLTISKDTSKSQVVLTMTDMDPEDTAT |
| | | molecule | YYCARIVGYGTGWYGFFDYWGQGILVTVSSGGGGSGGGGSGGGGSDI |
| | | | QMTQSPSSLSASVGDRVTITCRTSQGIRNDLGWYQQKPGKAPKRLIY |
| | | | AASSLQSGVPSRFSGSGSGTEFTLTISSLQPEDFATYYCLQHNSYPL |
| | | | TFGGGTKVEIKSGGGGSEVQLVESGGGLVQPGGSLKLSCAASGFTFN |
| | | | KYAMNWVRQAPGKGLEWVARIRSKYNNYATYYADSVKDRFTISRDDS |
| | | | KNTAYLQMNNLKTEDTAVYYCVRHGNFGNSYISYWAYWGQGTLVTVS |
| | | | SGGGGSGGGGSGGGGSQTVVTQEPSLTVSPGGTVTLTCGSSTGAVTS |
| | | | GNYPNWVQQKPGQAPRGLIGGTKFLAPGTPARFSGSLLGGKAALTLS |
| | | | GVQPEDEAEYYCVLWYSNRWVFGGGTKLTVLGGGGDKTHTCPPCPAP |
| | | | ELLGGPSVFLFPPKPKDTLMISRTPEVTCVVVDVSHEDPEVKFNWYV |
| | | | DGVEVHNAKTKPCEEQYGSTYRCVSVLTVLHQDWLNGKEYKCKVSNK |
| | | | ALPAPIEKTISKAKGQPREPQVYTLPPSREEMTKNQVSLTCLVKGFY |
| | | | PSDIAVEWESNGQPENNYKTTPPVLDSDGSFFLYSKLTVDKSRWQQG |
| | | | NVFSCSVMHEALHNHYTQKSLSLSPGKGGGGSGGGGSGGGGSGGGGS |
| | | | GGGGSGGGGSDKTHTCPPCPAPELLGGPSVFLFPPKPKDTLMISRTP |
| | | | EVTCVVVDVSHEDPEVKFNWYVDGVEVHNAKTKPCEEQYGSTYRCVS |
| | | | VLTVLHQDWLNGKEYKCKVSNKALPAPIEKTISKAKGQPREPQVYTL |
| | | | PPSREEMTKNQVSLTCLVKGFYPSDIAVEWESNGQPENNYKTTPPVL |
| | | | DSDGSFFLYSKLTVDKSRWQQGNVFSCSVMHEALHNHYTQKSLSLSP |
| | | | GK |
| 533. | FL_14_CCxC | VH | QVTLKESGPALVKPTQTLTLTCTFSGFSLSNARMGVSWIRQPPGKCL |
| | D3-scFc | | EWLAHIFSNDEKSYSTSLKSRLTISKDTSKSQVVLTMTDMDPEDTAT |
| | | | YYCARIVGYGTGWYGFFDYWGQGILVTVSS |
| 534. | FL_14_CCxC | VL | DIQMTQSPSSLSASVGDRVTITCRTSQGIRNDLGWYQQKPGKAPKRL |
| | D3-scFc | | IYAASSLQSGVPSRFSGSGSGTEFTLTISSLQPEDFATYYCLQHNSY |
| | | | PLTFGCGTKVEIK |
| 535. | FL_14_CCxC | scFv | QVTLKESGPALVKPTQTLTLTCTFSGFSLSNARMGVSWIRQPPGKCL |
| | D3-scFc | | EWLAHIFSNDEKSYSTSLKSRLTISKDTSKSQVVLTMTDMDPEDTAT |
| | | | YYCARIVGYGTGWYGFFDYWGQGILVTVSSGGGGSGGGGSGGGGSDI |
| | | | QMTQSPSSLSASVGDRVTITCRTSQGIRNDLGWYQQKPGKAPKRLIY |
| | | | AASSLQSGVPSRFSGSGSGTEFTLTISSLQPEDFATYYCLQHNSYPL |
| | | | TFGCGTKVEIKS |
| 536. | FL_14_CCxC | Bispecific | QVTLKESGPALVKPTQTLTLTCTFSGFSLSNARMGVSWIRQPPGKCL |
| | D3-scFc | molecule | EWLAHIFSNDEKSYSTSLKSRLTISKDTSKSQVVLTMTDMDPEDTAT |
| | | | YYCARIVGYGTGWYGFFDYWGQGILVTVSSGGGGSGGGGSGGGGSDI |
| | | | QMTQSPSSLSASVGDRVTITCRTSQGIRNDLGWYQQKPGKAPKRLIY |
| | | | AASSLQSGVPSRFSGSGSGTEFTLTISSLQPEDFATYYCLQHNSYPL |
| | | | TFGCGTKVEIKSGGGGSEVQLVESGGGLVQPGGSLKLSCAASGFTFN |
| | | | KYAMNWVRQAPGKGLEWVARIRSKYNNYATYYADSVKDRFTISRDDS |
| | | | KNTAYLQMNNLKTEDTAVYYCVRHGNFGNSYISYWAYWGQGTLVTVS |
| | | | SGGGGSGGGGSGGGGSQTVVTQEPSLTVSPGGTVTLTCGSSTGAVTS |
| | | | GNYPNWVQQKPGQAPRGLIGGTKFLAPGTPARFSGSLLGGKAALTLS |
| | | | GVQPEDEAEYYCVLWYSNRWVFGGGTKLTVL |
| 537. | FL_14_CCxC | Bispecific | QVTLKESGPALVKPTQTLTLTCTFSGFSLSNARMGVSWIRQPPGKCL |
| | D3-scFc | HLE | EWLAHIFSNDEKSYSTSLKSRLTISKDTSKSQVVLTMTDMDPEDTAT |
| | | molecule | YYCARIVGYGTGWYGFFDYWGQGILVTVSSGGGGSGGGGSGGGGSDI |
| | | | QMTQSPSSLSASVGDRVTITCRTSQGIRNDLGWYQQKPGKAPKRLIY |
| | | | AASSLQSGVPSRFSGSGSGTEFTLTISSLQPEDFATYYCLQHNSYPL |
| | | | TFGCGTKVEIKSGGGGSEVQLVESGGGLVQPGGSLKLSCAASGFTFN |
| | | | KYAMNWVRQAPGKGLEWVARIRSKYNNYATYYADSVKDRFTISRDDS |
| | | | KNTAYLQMNNLKTEDTAVYYCVRHGNFGNSYISYWAYWGQGTLVTVS |
| | | | SGGGGSGGGGSGGGGSQTVVTQEPSLTVSPGGTVTLTCGSSTGAVTS |
| | | | GNYPNWVQQKPGQAPRGLIGGTKFLAPGTPARFSGSLLGGKAALTLS |
| | | | GVQPEDEAEYYCVLWYSNRWVFGGGTKLTVLGGGGDKTHTCPPCPAP |
| | | | ELLGGPSVFLFPPKPKDTLMISRTPEVTCVVVDVSHEDPEVKFNWYV |
| | | | DGVEVHNAKTKPCEEQYGSTYRCVSVLTVLHQDWLNGKEYKCKVSNK |
| | | | ALPAPIEKTISKAKGQPREPQVYTLPPSREEMTKNQVSLTCLVKGFY |
| | | | PSDIAVEWESNGQPENNYKTTPPVLDSDGSFFLYSKLTVDKSRWQQG |
| | | | NVFSCSVMHEALHNHYTQKSLSLSPGKGGGGSGGGGSGGGGSGGGGS |
| | | | GGGGSGGGGSDKTHTCPPCPAPELLGGPSVFLFPPKPKDTLMISRTP |
| | | | EVTCVVVDVSHEDPEVKFNWYVDGVEVHNAKTKPCEEQYGSTYRCVS |
| | | | VLTVLHQDWLNGKEYKCKVSNKALPAPIEKTISKAKGQPREPQVYTL |
| | | | PPSREEMTKNQVSLTCLVKGFYPSDIAVEWESNGQPENNYKTTPPVL |
| | | | DSDGSFFLYSKLTVDKSRWQQGNVFSCSVMHEALHNHYTQKSLSLSP |
| | | | GK |
| 538. | FL_15xCD3- | VH CDR1 | SYGMH |
| | scFc | | |
| 539. | FL_15xCD3- | VH CDR2 | viSYEGSNEFYAESVKG |
| | scFc | | |
| 540. | FL_15xCD3- | VH CDR3 | GGEITMVRGVIGYYYYGMDV |
| | scFc | | |
| 541. | FL_15xCD3- | VL CDR1 | RASQSISSYLN |
| | scFc | | |
| 542. | FL_15xCD3- | VL CDR2 | AASSLQS |
| | scFc | | |
| 543. | FL_15xCD3- | VL CDR3 | LQHNSYPLT |
| | scFc | | |
| 544. | FL_15xCD3- | VH | QVQLVESGGGVVQPGRSLRLSCAASGFTFSSYGMHWVRQAPGKGLEW |
| | cFc | | VAVISYEGSNEFYAESVKGRFTISRDNSKNTLYLQMNSLRAEDTAVY |
| | | | YCARGGEITMVRGVIGYYYYGMDVWGQGTTVTVSS |
| 545. | FL_15xCD3- | VL | DIQMTQSPSSLSASVGDRVTITCRASQSISSYLNWYQQKPGKAPKLL |
| | scFc | | IYAASSLQSGVPSRFSGSGSGTEFTLTISSLQPEDFATYYCLQHNSY |
| | | | PLTFGGGTKVEIK |
| 546. | FL_15xCD3- | scFv | QVQLVESGGGVVQPGRSLRLSCAASGFTFSSYGMHWVRQAPGKGLEW |
| | scFc | | VAVISYEGSNEFYAESVKGRFTISRDNSKNTLYLQMNSLRAEDTAVY |
| | | | YCARGGEITMVRGVIGYYYYGMDVWGQGTTVTVSSGGGGSGGGGSGG |
| | | | GGSDIQMTQSPSSLSASVGDRVTITCRASQSISSYLNWYQQKPGKAP |
| | | | KLLIYAASSLQSGVPSRFSGSGSGTEFTLTISSLQPEDFATYYCLQH |
| | | | NSYPLTFGGGTKVEIKS |
| 547. | FL_15xCD3- | Bispecific | QVQLVESGGGVVQPGRSLRLSCAASGFTFSSYGMHWVRQAPGKGLEW |
| | scFc | molecule | VAVISYEGSNEFYAESVKGRFTISRDNSKNTLYLQMNSLRAEDTAVY |
| | | | YCARGGEITMVRGVIGYYYYGMDVWGQGTTVTVSSGGGGSGGGGSGG |
| | | | GGSDIQMTQSPSSLSASVGDRVTITCRASQSISSYLNWYQQKPGKAP |
| | | | KLLIYAASSLQSGVPSRFSGSGSGTEFTLTISSLQPEDFATYYCLQH |
| | | | NSYPLTFGGGTKVEIKSGGGGSEVQLVESGGGLVQPGGSLKLSCAAS |
| | | | GFTFNKYAMNWVRQAPGKGLEWVARIRSKYNNYATYYADSVKDRFTI |
| | | | SRDDSKNTAYLQMNNLKTEDTAVYYCVRHGNFGNSYISYWAYWGQGT |
| | | | LVTVSSGGGGSGGGGSGGGGSQTVVTQEPSLTVSPGGTVTLTCGSST |
| | | | GAVTSGNYPNWVQQKPGQAPRGLIGGTKFLAPGTPARFSGSLLGGKA |
| | | | ALTLSGVQPEDEAEYYCVLWYSNRWVFGGGTKLTVL |
| 548. | FL_15xCD3- | Bispecific | QVQLVESGGGVVQPGRSLRLSCAASGFTFSSYGMHWVRQAPGKGLEW |
| | scFc | HLE | VAVISYEGSNEFYAESVKGRFTISRDNSKNTLYLQMNSLRAEDTAVY |
| | | molecule | YCARGGEITMVRGVIGYYYYGMDVWGQGTTVTVSSGGGGSGGGGSGG |
| | | | GGSDIQMTQSPSSLSASVGDRVTITCRASQSISSYLNWYQQKPGKAP |
| | | | KLLIYAASSLQSGVPSRFSGSGSGTEFTLTISSLQPEDFATYYCLQH |
| | | | NSYPLTFGGGTKVEIKSGGGGSEVQLVESGGGLVQPGGSLKLSCAAS |
| | | | GFTFNKYAMNWVRQAPGKGLEWVARIRSKYNNYATYYADSVKDRFTI |
| | | | SRDDSKNTAYLQMNNLKTEDTAVYYCVRHGNFGNSYISYWAYWGQGT |
| | | | LVTVSSGGGGSGGGGSGGGGSQTVVTQEPSLTVSPGGTVTLTCGSST |
| | | | GAVTSGNYPNWVQQKPGQAPRGLIGGTKFLAPGTPARFSGSLLGGKA |
| | | | ALTLSGVQPEDEAEYYCVLWYSNRWVFGGGTKLTVLGGGGDKTHTCP |
| | | | PCPAPELLGGPSVFLFPPKPKDTLMISRTPEVTCVVVDVSHEDPEVK |
| | | | FNWYVDGVEVHNAKTKPCEEQYGSTYRCVSVLTVLHQDWLNGKEYKC |
| | | | KVSNKALPAPIEKTISKAKGQPREPQVYTLPPSREEMTKNQVSLTCL |
| | | | VKGFYPSDIAVEWESNGQPENNYKTTPPVLDSDGSFFLYSKLTVDKS |
| | | | RWQQGNVFSCSVMHEALHNHYTQKSLSLSPGKGGGGSGGGGSGGGGS |
| | | | GGGGSGGGGSGGGGSDKTHTCPPCPAPELLGGPSVFLFPPKPKDTLM |
| | | | ISRTPEVTCVVVDVSHEDPEVKFNWYVDGVEVHNAKTKPCEEQYGST |
| | | | YRCVSVLTVLHQDWLNGKEYKCKVSNKALPAPIEKTISKAKGQPREP |
| | | | QVYTLPPSREEMTKNQVSLTCLVKGFYPSDIAVEWESNGQPENNYKT |
| | | | TPPVLDSDGSFFLYSKLTVDKSRWQQGNVFSCSVMHEALHNHYTQKS |
| | | | LSLSPGK |
| 549. | FL_15_CCxC | VH | QVQLVESGGGVVQPGRSLRLSCAASGFTFSSYGMHWVRQAPGKCLEW |
| | D3-scFc | | VAVISYEGSNEFYAESVKGRFTISRDNSKNTLYLQMNSLRAEDTAVY |
| | | | YCARGGEITMVRGVIGYYYYGMDVWGQGTTVTVSS |
| 550. | FL_15_CCxC | VL | DIQMTQSPSSLSASVGDRVTITCRASQSISSYLNWYQQKPGKAPKLL |
| | D3-scFc | | IYAASSLQSGVPSRFSGSGSGTEFTLTISSLQPEDFATYYCLQHNSY |
| | | | PLTFGCGTKVEIK |
| 551. | FL_15_CCxC | scFv | QVQLVESGGGVVQPGRSLRLSCAASGFTFSSYGMHWVRQAPGKCLEW |
| | D3-scFc | | VAVISYEGSNEFYAESVKGRFTISRDNSKNTLYLQMNSLRAEDTAVY |
| | | | YCARGGEITMVRGVIGYYYYGMDVWGQGTTVTVSSGGGGSGGGGSGG |
| | | | GGSDIQMTQSPSSLSASVGDRVTITCRASQSISSYLNWYQQKPGKAP |
| | | | KLLIYAASSLQSGVPSRFSGSGSGTEFTLTISSLQPEDFATYYCLQH |
| | | | NSYPLTFGCGTKVEIKS |
| 552. | FL_15_CCxC | Bispecific | QVQLVESGGGVVQPGRSLRLSCAASGFTFSSYGMHWVRQAPGKCLEW |
| | D3-scFc | molecule | VAVISYEGSNEFYAESVKGRFTISRDNSKNTLYLQMNSLRAEDTAVY |
| | | | YCARGGEITMVRGVIGYYYYGMDVWGQGTTVTVSSGGGGSGGGGSGG |
| | | | GGSDIQMTQSPSSLSASVGDRVTITCRASQSISSYLNWYQQKPGKAP |
| | | | KLLIYAASSLQSGVPSRFSGSGSGTEFTLTISSLQPEDFATYYCLQH |
| | | | NSYPLTFGCGTKVEIKSGGGGSEVQLVESGGGLVQPGGSLKLSCAAS |
| | | | GFTFNKYAMNWVRQAPGKGLEWVARIRSKYNNYATYYADSVKDRFTI |
| | | | SRDDSKNTAYLQMNNLKTEDTAVYYCVRHGNFGNSYISYWAYWGQGT |
| | | | LVTVSSGGGGSGGGGSGGGGSQTVVTQEPSLTVSPGGTVTLTCGSST |
| | | | GAVTSGNYPNWVQQKPGQAPRGLIGGTKFLAPGTPARFSGSLLGGKA |
| | | | ALTLSGVQPEDEAEYYCVLWYSNRWVFGGGTKLTVL |
| 553. | FL_15_CCxC | Bispecific | QVQLVESGGGVVQPGRSLRLSCAASGFTFSSYGMHWVRQAPGKCLEW |
| | D3-scFc | HLE | VAVISYEGSNEFYAESVKGRFTISRDNSKNTLYLQMNSLRAEDTAVY |
| | | molecule | YCARGGEITMVRGVIGYYYYGMDVWGQGTTVTVSSGGGGSGGGGSGG |
| | | | GGSDIQMTQSPSSLSASVGDRVTITCRASQSISSYLNWYQQKPGKAP |
| | | | KLLIYAASSLQSGVPSRFSGSGSGTEFTLTISSLQPEDFATYYCLQH |
| | | | NSYPLTFGCGTKVEIKSGGGGSEVQLVESGGGLVQPGGSLKLSCAAS |
| | | | GFTFNKYAMNWVRQAPGKGLEWVARIRSKYNNYATYYADSVKDRFTI |
| | | | SRDDSKNTAYLQMNNLKTEDTAVYYCVRHGNFGNSYISYWAYWGQGT |
| | | | LVTVSSGGGGSGGGGSGGGGSQTVVTQEPSLTVSPGGTVTLTCGSST |
| | | | GAVTSGNYPNWVQQKPGQAPRGLIGGTKFLAPGTPARFSGSLLGGKA |
| | | | ALTLSGVQPEDEAEYYCVLWYSNRWVFGGGTKLTVLGGGGDKTHTCP |
| | | | PCPAPELLGGPSVFLFPPKPKDTLMISRTPEVTCVVVDVSHEDPEVK |
| | | | FNWYVDGVEVHNAKTKPCEEQYGSTYRCVSVLTVLHQDWLNGKEYKC |
| | | | KVSNKALPAPIEKTISKAKGQPREPQVYTLPPSREEMTKNQVSLTCL |
| | | | VKGFYPSDIAVEWESNGQPENNYKTTPPVLDSDGSFFLYSKLTVDKS |
| | | | RWQQGNVFSCSVMHEALHNHYTQKSLSLSPGKGGGGSGGGGSGGGGS |
| | | | GGGGSGGGGSGGGGSDKTHTCPPCPAPELLGGPSVFLFPPKPKDTLM |
| | | | ISRTPEVTCVVVDVSHEDPEVKFNWYVDGVEVHNAKTKPCEEQYGST |
| | | | YRCVSVLTVLHQDWLNGKEYKCKVSNKALPAPIEKTISKAKGQPREP |
| | | | QVYTLPPSREEMTKNQVSLTCLVKGFYPSDIAVEWESNGQPENNYKT |
| | | | TPPVLDSDGSFFLYSKLTVDKSRWQQGNVFSCSVMHEALHNHYTQKS |
| | | | LSLSPGK |
| 554. | FL_1xCD3- | Bispecific | QVTLKESGPALVKPTETLTLTCTVSGFSLSNARMGVSWIRQPPGKAL |
| | scFc_delGK | HLE | EWLANIFSNDEKSYSTSLKSRLTISKGTSKSQVVLTMTNMDPEDTAT |
| | | molecule | YYCARIVGYGSGWYGYFDYWGQGTLVTVSSGGGGSGGGGSGGGGSDI |
| | | | QMTQSPSSLSASVGDRVTITCRASQGIRNDLGWYQQKPGKAPQRLIY |
| | | | AASSLQSGVPSRFSGSGSGTEFTLTISSLQPEDFATYYCLQHNSYPL |
| | | | TFGGGTKVEIKSGGGGSEVQLVESGGGLVQPGGSLKLSCAASGFTFN |
| | | | KYAMNWVRQAPGKGLEWVARIRSKYNNYATYYADSVKDRFTISRDDS |
| | | | KNTAYLQMNNLKTEDTAVYYCVRHGNFGNSYISYWAYWGQGTLVTVS |
| | | | SGGGGSGGGGSGGGGSQTVVTQEPSLTVSPGGTVTLTCGSSTGAVTS |
| | | | GNYPNWVQQKPGQAPRGLIGGTKFLAPGTPARFSGSLLGGKAALTLS |
| | | | GVQPEDEAEYYCVLWYSNRWVFGGGTKLTVLGGGGDKTHTCPPCPAP |
| | | | ELLGGPSVFLFPPKPKDTLMISRTPEVTCVVVDVSHEDPEVKFNWYV |
| | | | DGVEVHNAKTKPCEEQYGSTYRCVSVLTVLHQDWLNGKEYKCKVSNK |
| | | | ALPAPIEKTISKAKGQPREPQVYTLPPSREEMTKNQVSLTCLVKGFY |
| | | | PSDIAVEWESNGQPENNYKTTPPVLDSDGSFFLYSKLTVDKSRWQQG |
| | | | NVFSCSVMHEALHNHYTQKSLSLSPGGGGSGGGGSGGGGSGGGGSGG |
| | | | GGSGGGGSDKTHTCPPCPAPELLGGPSVFLFPPKPKDTLMISRTPEV |
| | | | TCVVVDVSHEDPEVKFNWYVDGVEVHNAKTKPCEEQYGSTYRCVSVL |
| | | | TVLHQDWLNGKEYKCKVSNKALPAPIEKTISKAKGQPREPQVYTLPP |
| | | | SREEMTKNQVSLTCLVKGFYPSDIAVEWESNGQPENNYKTTPPVLDS |
| | | | DGSFFLYSKLTVDKSRWQQGNVFSCSVMHEALHNHYTQKSLSLSPGK |
| 555. | FL_1_CCxCD | Bispecific | QVTLKESGPALVKPTETLTLTCTVSGFSLSNARMGVSWIRQPPGKCL |
| | 3-scFc_delGK | HLE | EWLANIFSNDEKSYSTSLKSRLTISKGTSKSQVVLTMTNMDPEDTAT |
| | | molecule | YYCARIVGYGSGWYGYFDYWGQGTLVTVSSGGGGSGGGGSGGGGSDI |
| | | | QMTQSPSSLSASVGDRVTITCRASQGIRNDLGWYQQKPGKAPQRLIY |
| | | | AASSLQSGVPSRFSGSGSGTEFTLTISSLQPEDFATYYCLQHNSYPL |
| | | | TFGCGTKVEIKSGGGGSEVQLVESGGGLVQPGGSLKLSCAASGFTFN |
| | | | KYAMNWVRQAPGKGLEWVARIRSKYNNYATYYADSVKDRFTISRDDS |
| | | | KNTAYLQMNNLKTEDTAVYYCVRHGNFGNSYISYWAYWGQGTLVTVS |
| | | | SGGGGSGGGGSGGGGSQTVVTQEPSLTVSPGGTVTLTCGSSTGAVTS |
| | | | GNYPNWVQQKPGQAPRGLIGGTKFLAPGTPARFSGSLLGGKAALTLS |
| | | | GVQPEDEAEYYCVLWYSNRWVFGGGTKLTVLGGGGDKTHTCPPCPAP |
| | | | ELLGGPSVFLFPPKPKDTLMISRTPEVTCVVVDVSHEDPEVKFNWYV |
| | | | DGVEVHNAKTKPCEEQYGSTYRCVSVLTVLHQDWLNGKEYKCKVSNK |
| | | | ALPAPIEKTISKAKGQPREPQVYTLPPSREEMTKNQVSLTCLVKGFY |
| | | | PSDIAVEWESNGQPENNYKTTPPVLDSDGSFFLYSKLTVDKSRWQQG |
| | | | NVFSCSVMHEALHNHYTQKSLSLSPGGGGSGGGGSGGGGSGGGGSGG |
| | | | GGSGGGGSDKTHTCPPCPAPELLGGPSVFLFPPKPKDTLMISRTPEV |
| | | | TCVVVDVSHEDPEVKFNWYVDGVEVHNAKTKPCEEQYGSTYRCVSVL |
| | | | TVLHQDWLNGKEYKCKVSNKALPAPIEKTISKAKGQPREPQVYTLPP |
| | | | SREEMTKNQVSLTCLVKGFYPSDIAVEWESNGQPENNYKTTPPVLDS |
| | | | DGSFFLYSKLTVDKSRWQQGNVFSCSVMHEALHNHYTQKSLSLSPGK |
| 556. | FL_2xCD3- | Bispecific | QVTLKESGPTLVKPTETLTLTCTLSGFSLNNARMGVSWIRQPPGKAL |
| | scFc_delGK | HLE | EWLAHIFSNDEKSYSTSLKNRLTISKDSSKTQVVLTMTNVDPVDTAT |
| | | molecule | YYCARIVGYGSGWYGFFDYWGQGTLVTVSSGGGGSGGGGSGGGGSDI |
| | | | QMTQSPSSLSASVGDRVTITCRASQGIRNDLGWYQQKPGKAPKRLIY |
| | | | AASTLQSGVPSRFSGSGSGTEFTLTISSLQPEDFATYYCLQHNSYPL |
| | | | TFGGGTKVEIKSGGGGSEVQLVESGGGLVQPGGSLKLSCAASGFTFN |
| | | | KYAMNWVRQAPGKGLEWVARIRSKYNNYATYYADSVKDRFTISRDDS |
| | | | KNTAYLQMNNLKTEDTAVYYCVRHGNFGNSYISYWAYWGQGTLVTVS |
| | | | SGGGGSGGGGSGGGGSQTVVTQEPSLTVSPGGTVTLTCGSSTGAVTS |
| | | | GNYPNWVQQKPGQAPRGLIGGTKFLAPGTPARFSGSLLGGKAALTLS |
| | | | GVQPEDEAEYYCVLWYSNRWVFGGGTKLTVLGGGGDKTHTCPPCPAP |
| | | | ELLGGPSVFLFPPKPKDTLMISRTPEVTCVVVDVSHEDPEVKFNWYV |
| | | | DGVEVHNAKTKPCEEQYGSTYRCVSVLTVLHQDWLNGKEYKCKVSNK |
| | | | ALPAPIEKTISKAKGQPREPQVYTLPPSREEMTKNQVSLTCLVKGFY |
| | | | PSDIAVEWESNGQPENNYKTTPPVLDSDGSFFLYSKLTVDKSRWQQG |
| | | | NVFSCSVMHEALHNHYTQKSLSLSPGGGGSGGGGSGGGGSGGGGSGG |
| | | | GGSGGGGSDKTHTCPPCPAPELLGGPSVFLFPPKPKDTLMISRTPEV |
| | | | TCVVVDVSHEDPEVKFNWYVDGVEVHNAKTKPCEEQYGSTYRCVSVL |
| | | | TVLHQDWLNGKEYKCKVSNKALPAPIEKTISKAKGQPREPQVYTLPP |
| | | | SREEMTKNQVSLTCLVKGFYPSDIAVEWESNGQPENNYKTTPPVLDS |
| | | | DGSFFLYSKLTVDKSRWQQGNVFSCSVMHEALHNHYTQKSLSLSPGK |
| 557. | FL_2_CCxCD | Bispecific | QVTLKESGPTLVKPTETLTLTCTLSGFSLNNARMGVSWIRQPPGKCL |
| | 3-scFc_delGK | HLE | EWLAHIFSNDEKSYSTSLKNRLTISKDSSKTQVVLTMTNVDPVDTAT |
| | | molecule | YYCARIVGYGSGWYGFFDYWGQGTLVTVSSGGGGSGGGGSGGGGSDI |
| | | | QMTQSPSSLSASVGDRVTITCRASQGIRNDLGWYQQKPGKAPKRLIY |
| | | | AASTLQSGVPSRFSGSGSGTEFTLTISSLQPEDFATYYCLQHNSYPL |
| | | | TFGCGTKVEIKSGGGGSEVQLVESGGGLVQPGGSLKLSCAASGFTFN |
| | | | KYAMNWVRQAPGKGLEWVARIRSKYNNYATYYADSVKDRFTISRDDS |
| | | | KNTAYLQMNNLKTEDTAVYYCVRHGNFGNSYISYWAYWGQGTLVTVS |
| | | | SGGGGSGGGGSGGGGSQTVVTQEPSLTVSPGGTVTLTCGSSTGAVTS |
| | | | GNYPNWVQQKPGQAPRGLIGGTKFLAPGTPARFSGSLLGGKAALTLS |
| | | | GVQPEDEAEYYCVLWYSNRWVFGGGTKLTVLGGGGDKTHTCPPCPAP |
| | | | ELLGGPSVFLFPPKPKDTLMISRTPEVTCVVVDVSHEDPEVKFNWYV |
| | | | DGVEVHNAKTKPCEEQYGSTYRCVSVLTVLHQDWLNGKEYKCKVSNK |
| | | | ALPAPIEKTISKAKGQPREPQVYTLPPSREEMTKNQVSLTCLVKGFY |
| | | | PSDIAVEWESNGQPENNYKTTPPVLDSDGSFFLYSKLTVDKSRWQQG |
| | | | NVFSCSVMHEALHNHYTQKSLSLSPGGGGSGGGGSGGGGSGGGGSGG |
| | | | GGSGGGGSDKTHTCPPCPAPELLGGPSVFLFPPKPKDTLMISRTPEV |
| | | | TCVVVDVSHEDPEVKFNWYVDGVEVHNAKTKPCEEQYGSTYRCVSVL |
| | | | TVLHQDWLNGKEYKCKVSNKALPAPIEKTISKAKGQPREPQVYTLPP |
| | | | SREEMTKNQVSLTCLVKGFYPSDIAVEWESNGQPENNYKTTPPVLDS |
| | | | DGSFFLYSKLTVDKSRWQQGNVFSCSVMHEALHNHYTQKSLSLSPGK |
| 558. | FL_3xCD3- | Bispecific | QVTLKESGPALVKPTETLTLTCTLSGFSLNNARMAVSWIRQPPGKTL |
| | scFc_delGK | HLE | EWLAHIFSNDEKSYSTSLKSRLTISKDTSKGQVVLTMTNMDPVDTAT |
| | | molecule | YYCARIVGYGSGWYGYFDYWGQGTLVTVSSGGGGSGGGGSGGGGSDI |
| | | | QMTQSPSSLSASVGDRVTITCRASQDIRNDLGWYQQKPGKAPKRLIY |
| | | | AASTLQSGVPSRFSGSGSGTEFTLTISSLQPEDFATYYCLQHNSYPL |
| | | | TFGGGTKVEIKSGGGGSEVQLVESGGGLVQPGGSLKLSCAASGFTFN |
| | | | KYAMNWVRQAPGKGLEWVARIRSKYNNYATYYADSVKDRFTISRDDS |
| | | | KNTAYLQMNNLKTEDTAVYYCVRHGNFGNSYISYWAYWGQGTLVTVS |
| | | | SGGGGSGGGGSGGGGSQTVVTQEPSLTVSPGGTVTLTCGSSTGAVTS |
| | | | GNYPNWVQQKPGQAPRGLIGGTKFLAPGTPARFSGSLLGGKAALTLS |
| | | | GVQPEDEAEYYCVLWYSNRWVFGGGTKLTVLGGGGDKTHTCPPCPAP |
| | | | ELLGGPSVFLFPPKPKDTLMISRTPEVTCVVVDVSHEDPEVKFNWYV |
| | | | DGVEVHNAKTKPCEEQYGSTYRCVSVLTVLHQDWLNGKEYKCKVSNK |
| | | | ALPAPIEKTISKAKGQPREPQVYTLPPSREEMTKNQVSLTCLVKGFY |
| | | | PSDIAVEWESNGQPENNYKTTPPVLDSDGSFFLYSKLTVDKSRWQQG |
| | | | NVFSCSVMHEALHNHYTQKSLSLSPGGGGSGGGGSGGGGSGGGGSGG |
| | | | GGSGGGGSDKTHTCPPCPAPELLGGPSVFLFPPKPKDTLMISRTPEV |
| | | | TCVVVDVSHEDPEVKFNWYVDGVEVHNAKTKPCEEQYGSTYRCVSVL |
| | | | TVLHQDWLNGKEYKCKVSNKALPAPIEKTISKAKGQPREPQVYTLPP |
| | | | SREEMTKNQVSLTCLVKGFYPSDIAVEWESNGQPENNYKTTPPVLDS |
| | | | DGSFFLYSKLTVDKSRWQQGNVFSCSVMHEALHNHYTQKSLSLSPGK |
| 559. | FL_3_CCxCD | Bispecific | QVTLKESGPALVKPTETLTLTCTLSGFSLNNARMAVSWIRQPPGKCL |
| | 3-scFc_delGK | HLE | EWLAHIFSNDEKSYSTSLKSRLTISKDTSKGQVVLTMTNMDPVDTAT |
| | | molecule | YYCARIVGYGSGWYGYFDYWGQGTLVTVSSGGGGSGGGGSGGGGSDI |
| | | | QMTQSPSSLSASVGDRVTITCRASQDIRNDLGWYQQKPGKAPKRLIY |
| | | | AASTLQSGVPSRFSGSGSGTEFTLTISSLQPEDFATYYCLQHNSYPL |
| | | | TFGCGTKVEIKSGGGGSEVQLVESGGGLVQPGGSLKLSCAASGFTFN |
| | | | KYAMNWVRQAPGKGLEWVARIRSKYNNYATYYADSVKDRFTISRDDS |
| | | | KNTAYLQMNNLKTEDTAVYYCVRHGNFGNSYISYWAYWGQGTLVTVS |
| | | | SGGGGSGGGGSGGGGSQTVVTQEPSLTVSPGGTVTLTCGSSTGAVTS |
| | | | GNYPNWVQQKPGQAPRGLIGGTKFLAPGTPARFSGSLLGGKAALTLS |
| | | | GVQPEDEAEYYCVLWYSNRWVFGGGTKLTVLGGGGDKTHTCPPCPAP |
| | | | ELLGGPSVFLFPPKPKDTLMISRTPEVTCVVVDVSHEDPEVKFNWYV |
| | | | DGVEVHNAKTKPCEEQYGSTYRCVSVLTVLHQDWLNGKEYKCKVSNK |
| | | | ALPAPIEKTISKAKGQPREPQVYTLPPSREEMTKNQVSLTCLVKGFY |
| | | | PSDIAVEWESNGQPENNYKTTPPVLDSDGSFFLYSKLTVDKSRWQQG |
| | | | NVFSCSVMHEALHNHYTQKSLSLSPGGGGSGGGGSGGGGSGGGGSGG |
| | | | GGSGGGGSDKTHTCPPCPAPELLGGPSVFLFPPKPKDTLMISRTPEV |
| | | | TCVVVDVSHEDPEVKFNWYVDGVEVHNAKTKPCEEQYGSTYRCVSVL |
| | | | TVLHQDWLNGKEYKCKVSNKALPAPIEKTISKAKGQPREPQVYTLPP |
| | | | SREEMTKNQVSLTCLVKGFYPSDIAVEWESNGQPENNYKTTPPVLDS |
| | | | DGSFFLYSKLTVDKSRWQQGNVFSCSVMHEALHNHYTQKSLSLSPGK |
| 560. | FL_4xCD3- | Bispecific | QVTLKESGPALVKPTETLTLTCTLSGFSLNNAKMGVSWIRQPPGKAL |
| | scFc_delGK | HLE | EWLAHIFSNDEKSYSTSLKSRLTISKDTSKGQVVLTMTNMDPVDTAT |
| | | molecule | YYCARIVGYGSGWYGYFDYWGQGTLVTVSSGGGGSGGGGSGGGGSDI |
| | | | QMTQSPSSLSASVGDRVTITCRASQDIRDDLGWYQQKPGNAPKRLIY |
| | | | GASTLQSGVPSRFSGSGSGTEFTLTISSLQPEDFATYYCLQHNSYPL |
| | | | TFGGGTKVDIKSGGGGSEVQLVESGGGLVQPGGSLKLSCAASGFTFN |
| | | | KYAMNWVRQAPGKGLEWVARIRSKYNNYATYYADSVKDRFTISRDDS |
| | | | KNTAYLQMNNLKTEDTAVYYCVRHGNFGNSYISYWAYWGQGTLVTVS |
| | | | SGGGGSGGGGSGGGGSQTVVTQEPSLTVSPGGTVTLTCGSSTGAVTS |
| | | | GNYPNWVQQKPGQAPRGLIGGTKFLAPGTPARFSGSLLGGKAALTLS |
| | | | GVQPEDEAEYYCVLWYSNRWVFGGGTKLTVLGGGGDKTHTCPPCPAP |
| | | | ELLGGPSVFLFPPKPKDTLMISRTPEVTCVVVDVSHEDPEVKFNWYV |
| | | | DGVEVHNAKTKPCEEQYGSTYRCVSVLTVLHQDWLNGKEYKCKVSNK |
| | | | ALPAPIEKTISKAKGQPREPQVYTLPPSREEMTKNQVSLTCLVKGFY |
| | | | PSDIAVEWESNGQPENNYKTTPPVLDSDGSFFLYSKLTVDKSRWQQG |
| | | | NVFSCSVMHEALHNHYTQKSLSLSPGGGGSGGGGSGGGGSGGGGSGG |
| | | | GGSGGGGSDKTHTCPPCPAPELLGGPSVFLFPPKPKDTLMISRTPEV |
| | | | TCVVVDVSHEDPEVKFNWYVDGVEVHNAKTKPCEEQYGSTYRCVSVL |
| | | | TVLHQDWLNGKEYKCKVSNKALPAPIEKTISKAKGQPREPQVYTLPP |
| | | | SREEMTKNQVSLTCLVKGFYPSDIAVEWESNGQPENNYKTTPPVLDS |
| | | | DGSFFLYSKLTVDKSRWQQGNVFSCSVMHEALHNHYTQKSLSLSPGK |
| 561. | FL_4_CCxCD3- | Bispecific | QVTLKESGPALVKPTETLTLTCTLSGFSLNNAKMGVSWIRQPPGKCL |
| | scFc_delGK | HLE | EWLAHIFSNDEKSYSTSLKSRLTISKDTSKGQVVLTMTNMDPVDTAT |
| | | molecule | YYCARIVGYGSGWYGYFDYWGQGTLVTVSSGGGGSGGGGSGGGGSDI |
| | | | QMTQSPSSLSASVGDRVTITCRASQDIRDDLGWYQQKPGNAPKRLIY |
| | | | GASTLQSGVPSRFSGSGSGTEFTLTISSLQPEDFATYYCLQHNSYPL |
| | | | TFGCGTKVDIKSGGGGSEVQLVESGGGLVQPGGSLKLSCAASGFTFN |
| | | | KYAMNWVRQAPGKGLEWVARIRSKYNNYATYYADSVKDRFTISRDDS |
| | | | KNTAYLQMNNLKTEDTAVYYCVRHGNFGNSYISYWAYWGQGTLVTVS |
| | | | SGGGGSGGGGSGGGGSQTVVTQEPSLTVSPGGTVTLTCGSSTGAVTS |
| | | | GNYPNWVQQKPGQAPRGLIGGTKFLAPGTPARFSGSLLGGKAALTLS |
| | | | GVQPEDEAEYYCVLWYSNRWVFGGGTKLTVLGGGGDKTHTCPPCPAP |
| | | | ELLGGPSVFLFPPKPKDTLMISRTPEVTCVVVDVSHEDPEVKFNWYV |
| | | | DGVEVHNAKTKPCEEQYGSTYRCVSVLTVLHQDWLNGKEYKCKVSNK |
| | | | ALPAPIEKTISKAKGQPREPQVYTLPPSREEMTKNQVSLTCLVKGFY |
| | | | PSDIAVEWESNGQPENNYKTTPPVLDSDGSFFLYSKLTVDKSRWQQG |
| | | | NVFSCSVMHEALHNHYTQKSLSLSPGGGGSGGGGSGGGGSGGGGSGG |
| | | | GGSGGGGSDKTHTCPPCPAPELLGGPSVFLFPPKPKDTLMISRTPEV |
| | | | TCVVVDVSHEDPEVKFNWYVDGVEVHNAKTKPCEEQYGSTYRCVSVL |
| | | | TVLHQDWLNGKEYKCKVSNKALPAPIEKTISKAKGQPREPQVYTLPP |
| | | | SREEMTKNQVSLTCLVKGFYPSDIAVEWESNGQPENNYKTTPPVLDS |
| | | | DGSFFLYSKLTVDKSRWQQGNVFSCSVMHEALHNHYTQKSLSLSPGK |
| 562. | FL_5xCD3- | Bispecific | QVTLKESGPVLVKPTETLTLTCTVSGFSLRNARMAVSWIRQPPGKTL |
| | scFc_delGK | HLE | EWLAHIFSNDEKSYSTSLKSRLTISKDTSKSQVVLTMTNMDPVDTAT |
| | | molecule | YYCARIVGYGSGWYGYFDYWGQGTLVTVSSGGGGSGGGGSGGGGSDI |
| | | | QMTQSPSSVSASVGDRVTITCRASQDIRYDLAWYQQKPGKAPKRLIY |
| | | | AASSLQSGVPSRFSGSGSGTEFTLTISSLQPEDFATYYCLQHNFYPL |
| | | | TFGGGTKVEIKSGGGGSEVQLVESGGGLVQPGGSLKLSCAASGFTFN |
| | | | KYAMNWVRQAPGKGLEWVARIRSKYNNYATYYADSVKDRFTISRDDS |
| | | | KNTAYLQMNNLKTEDTAVYYCVRHGNFGNSYISYWAYWGQGTLVTVS |
| | | | SGGGGSGGGGSGGGGSQTVVTQEPSLTVSPGGTVTLTCGSSTGAVTS |
| | | | GNYPNWVQQKPGQAPRGLIGGTKFLAPGTPARFSGSLLGGKAALTLS |
| | | | GVQPEDEAEYYCVLWYSNRWVFGGGTKLTVLGGGGDKTHTCPPCPAP |
| | | | ELLGGPSVFLFPPKPKDTLMISRTPEVTCVVVDVSHEDPEVKFNWYV |
| | | | DGVEVHNAKTKPCEEQYGSTYRCVSVLTVLHQDWLNGKEYKCKVSNK |
| | | | ALPAPIEKTISKAKGQPREPQVYTLPPSREEMTKNQVSLTCLVKGFY |
| | | | PSDIAVEWESNGQPENNYKTTPPVLDSDGSFFLYSKLTVDKSRWQQG |
| | | | NVFSCSVMHEALHNHYTQKSLSLSPGGGGSGGGGSGGGGSGGGGSGG |
| | | | GGSGGGGSDKTHTCPPCPAPELLGGPSVFLFPPKPKDTLMISRTPEV |
| | | | TCVVVDVSHEDPEVKFNWYVDGVEVHNAKTKPCEEQYGSTYRCVSVL |
| | | | TVLHQDWLNGKEYKCKVSNKALPAPIEKTISKAKGQPREPQVYTLPP |
| | | | SREEMTKNQVSLTCLVKGFYPSDIAVEWESNGQPENNYKTTPPVLDS |
| | | | DGSFFLYSKLTVDKSRWQQGNVFSCSVMHEALHNHYTQKSLSLSPGK |
| 563. | FL_5_CCxCD3- | Bispecific | QVTLKESGPVLVKPTETLTLTCTVSGFSLRNARMAVSWIRQPPGKCL |
| | scFc_delGK | HLE | EWLAHIFSNDEKSYSTSLKSRLTISKDTSKSQVVLTMTNMDPVDTAT |
| | | molecule | YYCARIVGYGSGWYGYFDYWGQGTLVTVSSGGGGSGGGGSGGGGSDI |
| | | | QMTQSPSSVSASVGDRVTITCRASQDIRYDLAWYQQKPGKAPKRLIY |
| | | | AASSLQSGVPSRFSGSGSGTEFTLTISSLQPEDFATYYCLQHNFYPL |
| | | | TFGCGTKVEIKSGGGGSEVQLVESGGGLVQPGGSLKLSCAASGFTFN |
| | | | KYAMNWVRQAPGKGLEWVARIRSKYNNYATYYADSVKDRFTISRDDS |
| | | | KNTAYLQMNNLKTEDTAVYYCVRHGNFGNSYISYWAYWGQGTLVTVS |
| | | | SGGGGSGGGGSGGGGSQTVVTQEPSLTVSPGGTVTLTCGSSTGAVTS |
| | | | GNYPNWVQQKPGQAPRGLIGGTKFLAPGTPARFSGSLLGGKAALTLS |
| | | | GVQPEDEAEYYCVLWYSNRWVFGGGTKLTVLGGGGDKTHTCPPCPAP |
| | | | ELLGGPSVFLFPPKPKDTLMISRTPEVTCVVVDVSHEDPEVKFNWYV |
| | | | DGVEVHNAKTKPCEEQYGSTYRCVSVLTVLHQDWLNGKEYKCKVSNK |
| | | | ALPAPIEKTISKAKGQPREPQVYTLPPSREEMTKNQVSLTCLVKGFY |
| | | | PSDIAVEWESNGQPENNYKTTPPVLDSDGSFFLYSKLTVDKSRWQQG |
| | | | NVFSCSVMHEALHNHYTQKSLSLSPGGGGSGGGGSGGGGSGGGGSGG |
| | | | GGSGGGGSDKTHTCPPCPAPELLGGPSVFLFPPKPKDTLMISRTPEV |
| | | | TCVVVDVSHEDPEVKFNWYVDGVEVHNAKTKPCEEQYGSTYRCVSVL |
| | | | TVLHQDWLNGKEYKCKVSNKALPAPIEKTISKAKGQPREPQVYTLPP |
| | | | SREEMTKNQVSLTCLVKGFYPSDIAVEWESNGQPENNYKTTPPVLDS |
| | | | DGSFFLYSKLTVDKSRWQQGNVFSCSVMHEALHNHYTQKSLSLSPGK |
| 564. | FL_6xCD3- | Bispecific | QVTLKESGPVLVKPTQTLTLTCTFSGFSLSNARMGVSWIRQPPGKAL |
| | scFc_delGK | HLE | EWLAHIFSNDEKSFSTSLKNRLTISKDTSKSQVVLTMTNMDPVDTAT |
| | | molecule | YYCARMVGYGSGWYAYFDYWGQGTQVTVSSGGGGSGGGGSGGGGSDI |
| | | | QMTQSPSSLSASVGDRVTITCRASQSISSYLNWYQQKPGKAPKLLIY |
| | | | AASSLQSGVPSRFSGSGSGTDFTLTISSLQPEDFATYYCLQHNSYPL |
| | | | TFGGGTKVEIKSGGGGSEVQLVESGGGLVQPGGSLKLSCAASGFTFN |
| | | | KYAMNWVRQAPGKGLEWVARIRSKYNNYATYYADSVKDRFTISRDDS |
| | | | KNTAYLQMNNLKTEDTAVYYCVRHGNFGNSYISYWAYWGQGTLVTVS |
| | | | SGGGGSGGGGSGGGGSQTVVTQEPSLTVSPGGTVTLTCGSSTGAVTS |
| | | | GNYPNWVQQKPGQAPRGLIGGTKFLAPGTPARFSGSLLGGKAALTLS |
| | | | GVQPEDEAEYYCVLWYSNRWVFGGGTKLTVLGGGGDKTHTCPPCPAP |
| | | | ELLGGPSVFLFPPKPKDTLMISRTPEVTCVVVDVSHEDPEVKFNWYV |
| | | | DGVEVHNAKTKPCEEQYGSTYRCVSVLTVLHQDWLNGKEYKCKVSNK |
| | | | ALPAPIEKTISKAKGQPREPQVYTLPPSREEMTKNQVSLTCLVKGFY |
| | | | PSDIAVEWESNGQPENNYKTTPPVLDSDGSFFLYSKLTVDKSRWQQG |
| | | | NVFSCSVMHEALHNHYTQKSLSLSPGGGGSGGGGSGGGGSGGGGSGG |
| | | | GGSGGGGSDKTHTCPPCPAPELLGGPSVFLFPPKPKDTLMISRTPEV |
| | | | TCVVVDVSHEDPEVKFNWYVDGVEVHNAKTKPCEEQYGSTYRCVSVL |
| | | | TVLHQDWLNGKEYKCKVSNKALPAPIEKTISKAKGQPREPQVYTLPP |
| | | | SREEMTKNQVSLTCLVKGFYPSDIAVEWESNGQPENNYKTTPPVLDS |
| | | | DGSFFLYSKLTVDKSRWQQGNVFSCSVMHEALHNHYTQKSLSLSPGK |
| 565. | FL_6_CCxCD | Bispecific | QVTLKESGPVLVKPTQTLTLTCTFSGFSLSNARMGVSWIRQPPGKCL |
| | 3-scFc_delGK | HLE | EWLAHIFSNDEKSFSTSLKNRLTISKDTSKSQVVLTMTNMDPVDTAT |
| | | molecule | YYCARMVGYGSGWYAYFDYWGQGTQVTVSSGGGGSGGGGSGGGGSDI |
| | | | QMTQSPSSLSASVGDRVTITCRASQSISSYLNWYQQKPGKAPKLLIY |
| | | | AASSLQSGVPSRFSGSGSGTDFTLTISSLQPEDFATYYCLQHNSYPL |
| | | | TFGCGTKVEIKSGGGGSEVQLVESGGGLVQPGGSLKLSCAASGFTFN |
| | | | KYAMNWVRQAPGKGLEWVARIRSKYNNYATYYADSVKDRFTISRDDS |
| | | | KNTAYLQMNNLKTEDTAVYYCVRHGNFGNSYISYWAYWGQGTLVTVS |
| | | | SGGGGSGGGGSGGGGSQTVVTQEPSLTVSPGGTVTLTCGSSTGAVTS |
| | | | GNYPNWVQQKPGQAPRGLIGGTKFLAPGTPARFSGSLLGGKAALTLS |
| | | | GVQPEDEAEYYCVLWYSNRWVFGGGTKLTVLGGGGDKTHTCPPCPAP |
| | | | ELLGGPSVFLEPPKPKDTLMISRTPEVTCVVVDVSHEDPEVKFNWYV |
| | | | DGVEVHNAKTKPCEEQYGSTYRCVSVLTVLHQDWLNGKEYKCKVSNK |
| | | | ALPAPIEKTISKAKGQPREPQVYTLPPSREEMTKNQVSLTCLVKGFY |
| | | | PSDIAVEWESNGQPENNYKTTPPVLDSDGSFFLYSKLTVDKSRWQQG |
| | | | NVFSCSVMHEALHNHYTQKSLSLSPGGGGSGGGGSGGGGSGGGGSGG |
| | | | GGSGGGGSDKTHTCPPCPAPELLGGPSVFLEPPKPKDTLMISRTPEV |
| | | | TCVVVDVSHEDPEVKFNWYVDGVEVHNAKTKPCEEQYGSTYRCVSVL |
| | | | TVLHQDWLNGKEYKCKVSNKALPAPIEKTISKAKGQPREPQVYTLPP |
| | | | SREEMTKNQVSLTCLVKGFYPSDIAVEWESNGQPENNYKTTPPVLDS |
| | | | DGSFFLYSKLTVDKSRWQQGNVFSCSVMHEALHNHYTQKSLSLSPGK |
| 566. | FL_7xCD3- | Bispecific | QVTLKESGPTLVKPTETLTLTCTVSGFSLNNARMGVSWIRQPPGKAL |
| | scFc_delGK | HLE | EWLAHIFSNDEKSYSTSLKNRLTISKDSSKTQVVLTMTNVDPVDTAT |
| | | molecule | YYCARIVGYGTGWEGYFDYWGQGTQVTVSSGGGGSGGGGSGGGGSDI |
| | | | QMTQSPSSLSASVGDRVTITCRASQDIRTDLAWYQQKPGKAPKRLIY |
| | | | AASSLQSGVPSRFSGSGSGTEFTLTISSLQPEDFATYYCLQHNRYPL |
| | | | TEGGGTKVDIKSGGGGSEVQLVESGGGLVQPGGSLKLSCAASGFTEN |
| | | | KYAMNWVRQAPGKGLEWVARIRSKYNNYATYYADSVKDRFTISRDDS |
| | | | KNTAYLQMNNLKTEDTAVYYCVRHGNFGNSYISYWAYWGQGTLVTVS |
| | | | SGGGGSGGGGSGGGGSQTVVTQEPSLTVSPGGTVTLTCGSSTGAVTS |
| | | | GNYPNWVQQKPGQAPRGLIGGTKFLAPGTPARFSGSLLGGKAALTLS |
| | | | GVQPEDEAEYYCVLWYSNRWVFGGGTKLTVLGGGGDKTHTCPPCPAP |
| | | | ELLGGPSVFLEPPKPKDTLMISRTPEVTCVVVDVSHEDPEVKFNWYV |
| | | | DGVEVHNAKTKPCEEQYGSTYRCVSVLTVLHQDWLNGKEYKCKVSNK |
| | | | ALPAPIEKTISKAKGQPREPQVYTLPPSREEMTKNQVSLTCLVKGFY |
| | | | PSDIAVEWESNGQPENNYKTTPPVLDSDGSFFLYSKLTVDKSRWQQG |
| | | | NVFSCSVMHEALHNHYTQKSLSLSPGGGGSGGGGSGGGGSGGGGSGG |
| | | | GGSGGGGSDKTHTCPPCPAPELLGGPSVFLEPPKPKDTLMISRTPEV |
| | | | TCVVVDVSHEDPEVKFNWYVDGVEVHNAKTKPCEEQYGSTYRCVSVL |
| | | | TVLHQDWLNGKEYKCKVSNKALPAPIEKTISKAKGQPREPQVYTLPP |
| | | | SREEMTKNQVSLTCLVKGFYPSDIAVEWESNGQPENNYKTTPPVLDS |
| | | | DGSFFLYSKLTVDKSRWQQGNVFSCSVMHEALHNHYTQKSLSLSPGK |
| 567. | FL_7_CCxCD | Bispecific | QVTLKESGPTLVKPTETLTLTCTVSGFSLNNARMGVSWIRQPPGKCL |
| | 3-scFc_delGK | HLE | EWLAHIFSNDEKSYSTSLKNRLTISKDSSKTQVVLTMTNVDPVDTAT |
| | | molecule | YYCARIVGYGTGWEGYFDYWGQGTQVTVSSGGGGSGGGGSGGGGSDI |
| | | | QMTQSPSSLSASVGDRVTITCRASQDIRTDLAWYQQKPGKAPKRLIY |
| | | | AASSLQSGVPSRFSGSGSGTEFTLTISSLQPEDFATYYCLQHNRYPL |
| | | | TEGCGTKVDIKSGGGGSEVQLVESGGGLVQPGGSLKLSCAASGFTEN |
| | | | KYAMNWVRQAPGKGLEWVARIRSKYNNYATYYADSVKDRFTISRDDS |
| | | | KNTAYLQMNNLKTEDTAVYYCVRHGNFGNSYISYWAYWGQGTLVTVS |
| | | | SGGGGSGGGGSGGGGSQTVVTQEPSLTVSPGGTVTLTCGSSTGAVTS |
| | | | GNYPNWVQQKPGQAPRGLIGGTKFLAPGTPARFSGSLLGGKAALTLS |
| | | | GVQPEDEAEYYCVLWYSNRWVFGGGTKLTVLGGGGDKTHTCPPCPAP |
| | | | ELLGGPSVFLEPPKPKDTLMISRTPEVTCVVVDVSHEDPEVKFNWYV |
| | | | DGVEVHNAKTKPCEEQYGSTYRCVSVLTVLHQDWLNGKEYKCKVSNK |
| | | | ALPAPIEKTISKAKGQPREPQVYTLPPSREEMTKNQVSLTCLVKGFY |
| | | | PSDIAVEWESNGQPENNYKTTPPVLDSDGSFFLYSKLTVDKSRWQQG |
| | | | NVFSCSVMHEALHNHYTQKSLSLSPGGGGSGGGGSGGGGSGGGGSGG |
| | | | GGSGGGGSDKTHTCPPCPAPELLGGPSVFLEPPKPKDTLMISRTPEV |
| | | | TCVVVDVSHEDPEVKFNWYVDGVEVHNAKTKPCEEQYGSTYRCVSVL |
| | | | TVLHQDWLNGKEYKCKVSNKALPAPIEKTISKAKGQPREPQVYTLPP |
| | | | SREEMTKNQVSLTCLVKGFYPSDIAVEWESNGQPENNYKTTPPVLDS |
| | | | DGSFFLYSKLTVDKSRWQQGNVFSCSVMHEALHNHYTQKSLSLSPGK |
| 568. | FL_8xCD3- | Bispecific | QVTLKESGPALVKPTETLTLTCTLSGFSLNNARMAVSWIRQPPGKTL |
| | scFc_delGK | HLE | EWLAHIFSNDEKSYSTSLKSRLTISKDTSKSQVVLTMTNMDPEDTAT |
| | | molecule | YYCARIVGYGTGWYGFEDYWGQGILVTVSSGGGGSGGGGSGGGGSDI |
| | | | QMTQSPSSLSASVGDRVTITCRASQGIRNDLAWYQQKPGKAPKRLIY |
| | | | AASSLQSGVPSRFSGSGSGTEFTLTISSLQPEDFATYYCLQHNSYPL |
| | | | TEGGGTKVEIKSGGGGSEVQLVESGGGLVQPGGSLKLSCAASGFTEN |
| | | | KYAMNWVRQAPGKGLEWVARIRSKYNNYATYYADSVKDRFTISRDDS |
| | | | KNTAYLQMNNLKTEDTAVYYCVRHGNFGNSYISYWAYWGQGTLVTVS |
| | | | SGGGGSGGGGSGGGGSQTVVTQEPSLTVSPGGTVTLTCGSSTGAVTS |
| | | | GNYPNWVQQKPGQAPRGLIGGTKFLAPGTPARFSGSLLGGKAALTLS |
| | | | GVQPEDEAEYYCVLWYSNRWVFGGGTKLTVLGGGGDKTHTCPPCPAP |
| | | | ELLGGPSVFLFPPKPKDTLMISRTPEVTCVVVDVSHEDPEVKFNWYV |
| | | | DGVEVHNAKTKPCEEQYGSTYRCVSVLTVLHQDWLNGKEYKCKVSNK |
| | | | ALPAPIEKTISKAKGQPREPQVYTLPPSREEMTKNQVSLTCLVKGFY |
| | | | PSDIAVEWESNGQPENNYKTTPPVLDSDGSFFLYSKLTVDKSRWQQG |
| | | | NVFSCSVMHEALHNHYTQKSLSLSPGGGGSGGGGSGGGGSGGGGSGG |
| | | | GGSGGGGSDKTHTCPPCPAPELLGGPSVFLFPPKPKDTLMISRTPEV |
| | | | TCVVVDVSHEDPEVKFNWYVDGVEVHNAKTKPCEEQYGSTYRCVSVL |
| | | | TVLHQDWLNGKEYKCKVSNKALPAPIEKTISKAKGQPREPQVYTLPP |
| | | | SREEMTKNQVSLTCLVKGFYPSDIAVEWESNGQPENNYKTTPPVLDS |
| | | | DGSFFLYSKLTVDKSRWQQGNVFSCSVMHEALHNHYTQKSLSLSPGK |
| 569. | FL_8_CCxCD3- | Bispecific | QVTLKESGPALVKPTETLTLTCTLSGFSLNNARMAVSWIRQPPGKCL |
| | scFc_delGK | HLE | EWLAHIFSNDEKSYSTSLKSRLTISKDTSKSQVVLTMTNMDPEDTAT |
| | | molecule | YYCARIVGYGTGWYGFFDYWGQGILVTVSSGGGGSGGGGSGGGGSDI |
| | | | QMTQSPSSLSASVGDRVTITCRASQGIRNDLAWYQQKPGKAPKRLIY |
| | | | AASSLQSGVPSRFSGSGSGTEFTLTISSLQPEDFATYYCLQHNSYPL |
| | | | TFGCGTKVEIKSGGGGSEVQLVESGGGLVQPGGSLKLSCAASGFTFN |
| | | | KYAMNWVRQAPGKGLEWVARIRSKYNNYATYYADSVKDRFTISRDDS |
| | | | KNTAYLQMNNLKTEDTAVYYCVRHGNFGNSYISYWAYWGQGTLVTVS |
| | | | SGGGGSGGGGSGGGGSQTVVTQEPSLTVSPGGTVTLTCGSSTGAVTS |
| | | | GNYPNWVQQKPGQAPRGLIGGTKFLAPGTPARFSGSLLGGKAALTLS |
| | | | GVQPEDEAEYYCVLWYSNRWVFGGGTKLTVLGGGGDKTHTCPPCPAP |
| | | | ELLGGPSVFLFPPKPKDTLMISRTPEVTCVVVDVSHEDPEVKFNWYV |
| | | | DGVEVHNAKTKPCEEQYGSTYRCVSVLTVLHQDWLNGKEYKCKVSNK |
| | | | ALPAPIEKTISKAKGQPREPQVYTLPPSREEMTKNQVSLTCLVKGFY |
| | | | PSDIAVEWESNGQPENNYKTTPPVLDSDGSFFLYSKLTVDKSRWQQG |
| | | | NVFSCSVMHEALHNHYTQKSLSLSPGGGGSGGGGSGGGGSGGGGSGG |
| | | | GGSGGGGSDKTHTCPPCPAPELLGGPSVFLFPPKPKDTLMISRTPEV |
| | | | TCVVVDVSHEDPEVKFNWYVDGVEVHNAKTKPCEEQYGSTYRCVSVL |
| | | | TVLHQDWLNGKEYKCKVSNKALPAPIEKTISKAKGQPREPQVYTLPP |
| | | | SREEMTKNQVSLTCLVKGFYPSDIAVEWESNGQPENNYKTTPPVLDS |
| | | | DGSFFLYSKLTVDKSRWQQGNVFSCSVMHEALHNHYTQKSLSLSPGK |
| 570. | FL_9xCD3- | Bispecific | QVTLKESGPTLVKPTETLTLTCTFSGFSLRYARMGVSWIRQPPGKAL |
| | scFc_delGK | HLE | EWLAHIFSNDEKSYSTSLKSRLTISKDTSKSQVVLTLTNMDPVDTAT |
| | | molecule | YFCARMPEYSSGWSGAFDIWGQGTMVTVSSGGGGSGGGGSGGGGSDI |
| | | | QMTQSPSSLSASVGDRVTITCRASQDIRNDLAWYQQKPGKAPKRLIY |
| | | | AASSLQSGVPSRFSGSGSGTEFTLTISSLQPEDFATYYCLQHNSYPL |
| | | | TFGGGTKLEIKSGGGGSEVQLVESGGGLVQPGGSLKLSCAASGFTFN |
| | | | KYAMNWVRQAPGKGLEWVARIRSKYNNYATYYADSVKDRFTISRDDS |
| | | | KNTAYLQMNNLKTEDTAVYYCVRHGNFGNSYISYWAYWGQGTLVTVS |
| | | | SGGGGSGGGGSGGGGSQTVVTQEPSLTVSPGGTVTLTCGSSTGAVTS |
| | | | GNYPNWVQQKPGQAPRGLIGGTKFLAPGTPARFSGSLLGGKAALTLS |
| | | | GVQPEDEAEYYCVLWYSNRWVFGGGTKLTVLGGGGDKTHTCPPCPAP |
| | | | ELLGGPSVFLFPPKPKDTLMISRTPEVTCVVVDVSHEDPEVKFNWYV |
| | | | DGVEVHNAKTKPCEEQYGSTYRCVSVLTVLHQDWLNGKEYKCKVSNK |
| | | | ALPAPIEKTISKAKGQPREPQVYTLPPSREEMTKNQVSLTCLVKGFY |
| | | | PSDIAVEWESNGQPENNYKTTPPVLDSDGSFFLYSKLTVDKSRWQQG |
| | | | NVFSCSVMHEALHNHYTQKSLSLSPGGGGSGGGGSGGGGSGGGGSGG |
| | | | GGSGGGGSDKTHTCPPCPAPELLGGPSVFLFPPKPKDTLMISRTPEV |
| | | | TCVVVDVSHEDPEVKFNWYVDGVEVHNAKTKPCEEQYGSTYRCVSVL |
| | | | TVLHQDWLNGKEYKCKVSNKALPAPIEKTISKAKGQPREPQVYTLPP |
| | | | SREEMTKNQVSLTCLVKGFYPSDIAVEWESNGQPENNYKTTPPVLDS |
| | | | DGSFFLYSKLTVDKSRWQQGNVFSCSVMHEALHNHYTQKSLSLSPGK |
| 571. | FL_9_CCxCD3- | Bispecific | QVTLKESGPTLVKPTETLTLTCTFSGFSLRYARMGVSWIRQPPGKCL |
| | scFc_delGK | HLE | EWLAHIFSNDEKSYSTSLKSRLTISKDTSKSQVVLTLTNMDPVDTAT |
| | | molecule | YFCARMPEYSSGWSGAFDIWGQGTMVTVSSGGGGSGGGGSGGGGSDI |
| | | | QMTQSPSSLSASVGDRVTITCRASQDIRNDLAWYQQKPGKAPKRLIY |
| | | | AASSLQSGVPSRFSGSGSGTEFTLTISSLQPEDFATYYCLQHNSYPL |
| | | | TFGCGTKLEIKSGGGGSEVQLVESGGGLVQPGGSLKLSCAASGFTFN |
| | | | KYAMNWVRQAPGKGLEWVARIRSKYNNYATYYADSVKDRFTISRDDS |
| | | | KNTAYLQMNNLKTEDTAVYYCVRHGNFGNSYISYWAYWGQGTLVTVS |
| | | | SGGGGSGGGGSGGGGSQTVVTQEPSLTVSPGGTVTLTCGSSTGAVTS |
| | | | GNYPNWVQQKPGQAPRGLIGGTKFLAPGTPARFSGSLLGGKAALTLS |
| | | | GVQPEDEAEYYCVLWYSNRWVFGGGTKLTVLGGGGDKTHTCPPCPAP |
| | | | ELLGGPSVFLFPPKPKDTLMISRTPEVTCVVVDVSHEDPEVKFNWYV |
| | | | DGVEVHNAKTKPCEEQYGSTYRCVSVLTVLHQDWLNGKEYKCKVSNK |
| | | | ALPAPIEKTISKAKGQPREPQVYTLPPSREEMTKNQVSLTCLVKGFY |
| | | | PSDIAVEWESNGQPENNYKTTPPVLDSDGSFFLYSKLTVDKSRWQQG |
| | | | NVFSCSVMHEALHNHYTQKSLSLSPGGGGSGGGGSGGGGSGGGGSGG |
| | | | GGSGGGGSDKTHTCPPCPAPELLGGPSVFLFPPKPKDTLMISRTPEV |
| | | | TCVVVDVSHEDPEVKFNWYVDGVEVHNAKTKPCEEQYGSTYRCVSVL |
| | | | TVLHQDWLNGKEYKCKVSNKALPAPIEKTISKAKGQPREPQVYTLPP |
| | | | SREEMTKNQVSLTCLVKGFYPSDIAVEWESNGQPENNYKTTPPVLDS |
| | | | DGSFFLYSKLTVDKSRWQQGNVFSCSVMHEALHNHYTQKSLSLSPGK |
| 572. | FL_10xCD3- | Bispecific | QVTLKESGPVLVKPTETLTLTCTVSGFSFRNARMGVSWIRQPPGKAL |
| | scFc_delGK | HLE | EWLAHIFSNDEKSYSTSLKSRLTISKDTSKSQVVLTLTNMDPVDTAT |
| | | molecule | YFCARMPEYSSGWSGAFDIWGQGTMVTVSSGGGGSGGGGSGGGGSDI |
| | | | QMTQSPSSLSASVGDRVTITCRASQDIRDDLGWYQQKPGNAPKRLIY |
| | | | GASTLQSGVPSRFSGSGSGTEFTLTISSLQPEDFATYYCLQHNSYPL |
| | | | TFGGGTKVDIKSGGGGSEVQLVESGGGLVQPGGSLKLSCAASGFTFN |
| | | | KYAMNWVRQAPGKGLEWVARIRSKYNNYATYYADSVKDRFTISRDDS |
| | | | KNTAYLQMNNLKTEDTAVYYCVRHGNFGNSYISYWAYWGQGTLVTVS |
| | | | SGGGGSGGGGSGGGGSQTVVTQEPSLTVSPGGTVTLTCGSSTGAVTS |
| | | | GNYPNWVQQKPGQAPRGLIGGTKFLAPGTPARFSGSLLGGKAALTLS |
| | | | GVQPEDEAEYYCVLWYSNRWVFGGGTKLTVLGGGGDKTHTCPPCPAP |
| | | | ELLGGPSVFLFPPKPKDTLMISRTPEVTCVVVDVSHEDPEVKFNWYV |
| | | | DGVEVHNAKTKPCEEQYGSTYRCVSVLTVLHQDWLNGKEYKCKVSNK |
| | | | ALPAPIEKTISKAKGQPREPQVYTLPPSREEMTKNQVSLTCLVKGFY |
| | | | PSDIAVEWESNGQPENNYKTTPPVLDSDGSFFLYSKLTVDKSRWQQG |
| | | | NVFSCSVMHEALHNHYTQKSLSLSPGGGGSGGGGSGGGGSGGGGSGG |
| | | | GGSGGGGSDKTHTCPPCPAPELLGGPSVFLFPPKPKDTLMISRTPEV |
| | | | TCVVVDVSHEDPEVKFNWYVDGVEVHNAKTKPCEEQYGSTYRCVSVL |
| | | | TVLHQDWLNGKEYKCKVSNKALPAPIEKTISKAKGQPREPQVYTLPP |
| | | | SREEMTKNQVSLTCLVKGFYPSDIAVEWESNGQPENNYKTTPPVLDS |
| | | | DGSFFLYSKLTVDKSRWQQGNVFSCSVMHEALHNHYTQKSLSLSPGK |
| 573. | FL_10_CCxC | Bispecific | QVTLKESGPVLVKPTETLTLTCTVSGFSFRNARMGVSWIRQPPGKCL |
| | D3- | HLE | EWLAHIFSNDEKSYSTSLKSRLTISKDTSKSQVVLTLTNMDPVDTAT |
| | scFc_delGK | molecule | YFCARMPEYSSGWSGAFDIWGQGTMVTVSSGGGGSGGGGSGGGGSDI |
| | | | QMTQSPSSLSASVGDRVTITCRASQDIRDDLGWYQQKPGNAPKRLIY |
| | | | GASTLQSGVPSRFSGSGSGTEFTLTISSLQPEDFATYYCLQHNSYPL |
| | | | TFGCGTKVDIKSGGGGSEVQLVESGGGLVQPGGSLKLSCAASGFTFN |
| | | | KYAMNWVRQAPGKGLEWVARIRSKYNNYATYYADSVKDRFTISRDDS |
| | | | KNTAYLQMNNLKTEDTAVYYCVRHGNFGNSYISYWAYWGQGTLVTVS |
| | | | SGGGGSGGGGSGGGGSQTVVTQEPSLTVSPGGTVTLTCGSSTGAVTS |
| | | | GNYPNWVQQKPGQAPRGLIGGTKFLAPGTPARFSGSLLGGKAALTLS |
| | | | GVQPEDEAEYYCVLWYSNRWVFGGGTKLTVLGGGGDKTHTCPPCPAP |
| | | | ELLGGPSVFLFPPKPKDTLMISRTPEVTCVVVDVSHEDPEVKFNWYV |
| | | | DGVEVHNAKTKPCEEQYGSTYRCVSVLTVLHQDWLNGKEYKCKVSNK |
| | | | ALPAPIEKTISKAKGQPREPQVYTLPPSREEMTKNQVSLTCLVKGFY |
| | | | PSDIAVEWESNGQPENNYKTTPPVLDSDGSFFLYSKLTVDKSRWQQG |
| | | | NVFSCSVMHEALHNHYTQKSLSLSPGGGGSGGGGSGGGGSGGGGSGG |
| | | | GGSGGGGSDKTHTCPPCPAPELLGGPSVFLFPPKPKDTLMISRTPEV |
| | | | TCVVVDVSHEDPEVKFNWYVDGVEVHNAKTKPCEEQYGSTYRCVSVL |
| | | | TVLHQDWLNGKEYKCKVSNKALPAPIEKTISKAKGQPREPQVYTLPP |
| | | | SREEMTKNQVSLTCLVKGFYPSDIAVEWESNGQPENNYKTTPPVLDS |
| | | | DGSFFLYSKLTVDKSRWQQGNVFSCSVMHEALHNHYTQKSLSLSPGK |
| 574. | FL_11xCD3- | Bispecific | QVTLKESGPALVKPTETLTLTCTVSGFSFRNARMGVSWIRQPPGKAL |
| | scFc_delGK | HLE | EWLAHIFSNDEKSYSTSLKSRLTISKDTSKSQVVLTLTNMDPVDTAT |
| | | molecule | YFCARMPEYSSGWSGAFDIWGQGTMVTVSSGGGGSGGGGSGGGGSDI |
| | | | QMTQSPSSLSASVGDRVTITCRASQDIGYDLGWYQQKPGKAPKRLIY |
| | | | AASTLQSGVPSRFSGSGSGTEFTLIISSLQPEDFATYYCLQHNSFPW |
| | | | TFGQGTKVEIKSGGGGSEVQLVESGGGLVQPGGSLKLSCAASGFTFN |
| | | | KYAMNWVRQAPGKGLEWVARIRSKYNNYATYYADSVKDRFTISRDDS |
| | | | KNTAYLQMNNLKTEDTAVYYCVRHGNFGNSYISYWAYWGQGTLVTVS |
| | | | SGGGGSGGGGSGGGGSQTVVTQEPSLTVSPGGTVTLTCGSSTGAVTS |
| | | | GNYPNWVQQKPGQAPRGLIGGTKFLAPGTPARFSGSLLGGKAALTLS |
| | | | GVQPEDEAEYYCVLWYSNRWVFGGGTKLTVLGGGGDKTHTCPPCPAP |
| | | | ELLGGPSVFLFPPKPKDTLMISRTPEVTCVVVDVSHEDPEVKFNWYV |
| | | | DGVEVHNAKTKPCEEQYGSTYRCVSVLTVLHQDWLNGKEYKCKVSNK |
| | | | ALPAPIEKTISKAKGQPREPQVYTLPPSREEMTKNQVSLTCLVKGFY |
| | | | PSDIAVEWESNGQPENNYKTTPPVLDSDGSFFLYSKLTVDKSRWQQG |
| | | | NVFSCSVMHEALHNHYTQKSLSLSPGGGGSGGGGSGGGGSGGGGSGG |
| | | | GGSGGGGSDKTHTCPPCPAPELLGGPSVFLFPPKPKDTLMISRTPEV |
| | | | TCVVVDVSHEDPEVKFNWYVDGVEVHNAKTKPCEEQYGSTYRCVSVL |
| | | | TVLHQDWLNGKEYKCKVSNKALPAPIEKTISKAKGQPREPQVYTLPP |
| | | | SREEMTKNQVSLTCLVKGFYPSDIAVEWESNGQPENNYKTTPPVLDS |
| | | | DGSFFLYSKLTVDKSRWQQGNVFSCSVMHEALHNHYTQKSLSLSPGK |
| 575. | FL_11_CCxC | Bispecific | QVTLKESGPALVKPTETLTLTCTVSGFSFRNARMGVSWIRQPPGKCL |
| | D3- | HLE | EWLAHIFSNDEKSYSTSLKSRLTISKDTSKSQVVLTLTNMDPVDTAT |
| | scFc_delGK | molecule | YFCARMPEYSSGWSGAFDIWGQGTMVTVSSGGGGSGGGGSGGGGSDI |
| | | | QMTQSPSSLSASVGDRVTITCRASQDIGYDLGWYQQKPGKAPKRLIY |
| | | | AASTLQSGVPSRFSGSGSGTEFTLIISSLQPEDFATYYCLQHNSFPW |
| | | | TFGCGTKVEIKSGGGGSEVQLVESGGGLVQPGGSLKLSCAASGFTFN |
| | | | KYAMNWVRQAPGKGLEWVARIRSKYNNYATYYADSVKDRFTISRDDS |
| | | | KNTAYLQMNNLKTEDTAVYYCVRHGNFGNSYISYWAYWGQGTLVTVS |
| | | | SGGGGSGGGGSGGGGSQTVVTQEPSLTVSPGGTVTLTCGSSTGAVTS |
| | | | GNYPNWVQQKPGQAPRGLIGGTKFLAPGTPARFSGSLLGGKAALTLS |
| | | | GVQPEDEAEYYCVLWYSNRWVFGGGTKLTVLGGGGDKTHTCPPCPAP |
| | | | ELLGGPSVFLFPPKPKDTLMISRTPEVTCVVVDVSHEDPEVKFNWYV |
| | | | DGVEVHNAKTKPCEEQYGSTYRCVSVLTVLHQDWLNGKEYKCKVSNK |
| | | | ALPAPIEKTISKAKGQPREPQVYTLPPSREEMTKNQVSLTCLVKGFY |
| | | | PSDIAVEWESNGQPENNYKTTPPVLDSDGSFFLYSKLTVDKSRWQQG |
| | | | NVFSCSVMHEALHNHYTQKSLSLSPGGGGSGGGGSGGGGSGGGGSGG |
| | | | GGSGGGGSDKTHTCPPCPAPELLGGPSVFLFPPKPKDTLMISRTPEV |
| | | | TCVVVDVSHEDPEVKFNWYVDGVEVHNAKTKPCEEQYGSTYRCVSVL |
| | | | TVLHQDWLNGKEYKCKVSNKALPAPIEKTISKAKGQPREPQVYTLPP |
| | | | SREEMTKNQVSLTCLVKGFYPSDIAVEWESNGQPENNYKTTPPVLDS |
| | | | DGSFFLYSKLTVDKSRWQQGNVFSCSVMHEALHNHYTQKSLSLSPGK |
| 576. | FL_12xCD3- | Bispecific | QVTLKESGPALVKPTQTLTLTCTFSGFSLSNARMGVSWIRQPPGKAL |
| | scFc_delGK | HLE | EWLAHIFSNDEKSYRTSLKSRLTISKDTSKSQVVLTMTNMDPVDTAT |
| | | molecule | YYCARIVGYGSGWYAYFDYWGQGTLVTVSSGGGGSGGGGSGGGGSDI |
| | | | QMTQSPSSLSASVGDRVTITCRASQGIRNDLGWYQQKPGKAPKRLIY |
| | | | AASSLQSGVPSRFSGSGSGTEFTLTISSLQPEDFATYYCLQHNSYPL |
| | | | TFGGGTKVEIKSGGGGSEVQLVESGGGLVQPGGSLKLSCAASGFTFN |
| | | | KYAMNWVRQAPGKGLEWVARIRSKYNNYATYYADSVKDRFTISRDDS |
| | | | KNTAYLQMNNLKTEDTAVYYCVRHGNFGNSYISYWAYWGQGTLVTVS |
| | | | SGGGGSGGGGSGGGGSQTVVTQEPSLTVSPGGTVTLTCGSSTGAVTS |
| | | | GNYPNWVQQKPGQAPRGLIGGTKFLAPGTPARFSGSLLGGKAALTLS |
| | | | GVQPEDEAEYYCVLWYSNRWVFGGGTKLTVLGGGGDKTHTCPPCPAP |
| | | | ELLGGPSVFLFPPKPKDTLMISRTPEVTCVVVDVSHEDPEVKFNWYV |
| | | | DGVEVHNAKTKPCEEQYGSTYRCVSVLTVLHQDWLNGKEYKCKVSNK |
| | | | ALPAPIEKTISKAKGQPREPQVYTLPPSREEMTKNQVSLTCLVKGFY |
| | | | PSDIAVEWESNGQPENNYKTTPPVLDSDGSFFLYSKLTVDKSRWQQG |
| | | | NVFSCSVMHEALHNHYTQKSLSLSPGGGGSGGGGSGGGGSGGGGSGG |
| | | | GGSGGGGSDKTHTCPPCPAPELLGGPSVFLFPPKPKDTLMISRTPEV |
| | | | TCVVVDVSHEDPEVKFNWYVDGVEVHNAKTKPCEEQYGSTYRCVSVL |
| | | | TVLHQDWLNGKEYKCKVSNKALPAPIEKTISKAKGQPREPQVYTLPP |
| | | | SREEMTKNQVSLTCLVKGFYPSDIAVEWESNGQPENNYKTTPPVLDS |
| | | | DGSFFLYSKLTVDKSRWQQGNVFSCSVMHEALHNHYTQKSLSLSPGK |
| 577. | FL_12_CCxC | Bispecific | QVTLKESGPALVKPTQTLTLTCTFSGFSLSNARMGVSWIRQPPGKCL |
| | D3- | HLE | EWLAHIFSNDEKSYRTSLKSRLTISKDTSKSQVVLTMTNMDPVDTAT |
| | scFc_delGK | molecule | YYCARIVGYGSGWYAYFDYWGQGTLVTVSSGGGGSGGGGSGGGGSDI |
| | | | QMTQSPSSLSASVGDRVTITCRASQGIRNDLGWYQQKPGKAPKRLIY |
| | | | AASSLQSGVPSRFSGSGSGTEFTLTISSLQPEDFATYYCLQHNSYPL |
| | | | TFGCGTKVEIKSGGGGSEVQLVESGGGLVQPGGSLKLSCAASGFTFN |
| | | | KYAMNWVRQAPGKGLEWVARIRSKYNNYATYYADSVKDRFTISRDDS |
| | | | KNTAYLQMNNLKTEDTAVYYCVRHGNFGNSYISYWAYWGQGTLVTVS |
| | | | SGGGGSGGGGSGGGGSQTVVTQEPSLTVSPGGTVTLTCGSSTGAVTS |
| | | | GNYPNWVQQKPGQAPRGLIGGTKFLAPGTPARFSGSLLGGKAALTLS |
| | | | GVQPEDEAEYYCVLWYSNRWVFGGGTKLTVLGGGGDKTHTCPPCPAP |
| | | | ELLGGPSVFLFPPKPKDTLMISRTPEVTCVVVDVSHEDPEVKFNWYV |
| | | | DGVEVHNAKTKPCEEQYGSTYRCVSVLTVLHQDWLNGKEYKCKVSNK |
| | | | ALPAPIEKTISKAKGQPREPQVYTLPPSREEMTKNQVSLTCLVKGFY |
| | | | PSDIAVEWESNGQPENNYKTTPPVLDSDGSFFLYSKLTVDKSRWQQG |
| | | | NVFSCSVMHEALHNHYTQKSLSLSPGGGGSGGGGSGGGGSGGGGSGG |
| | | | GGSGGGGSDKTHTCPPCPAPELLGGPSVFLFPPKPKDTLMISRTPEV |
| | | | TCVVVDVSHEDPEVKFNWYVDGVEVHNAKTKPCEEQYGSTYRCVSVL |
| | | | TVLHQDWLNGKEYKCKVSNKALPAPIEKTISKAKGQPREPQVYTLPP |
| | | | SREEMTKNQVSLTCLVKGFYPSDIAVEWESNGQPENNYKTTPPVLDS |
| | | | DGSFFLYSKLTVDKSRWQQGNVFSCSVMHEALHNHYTQKSLSLSPGK |
| 578. | FL_13xCD3- | Bispecific | QVTLKESGPVLVKPTQTLTLTCTFSGFSLSNARMGVSWIRQPPGKAL |
| | scFc_delGK | HLE | EWLALIYWNDDKRYSPSLKSRLTITKDTSKNQVVLTMTNMDPVDTAT |
| | | molecule | YYCARMVGYGSGWYAYFDYWGQGTLVTVSSGGGGSGGGGSGGGGSDI |
| | | | QMTQSPSSLSASVGDRVTITCRASQGIRNDLGWYQQKPGKAPKRLIY |
| | | | AASSLQSGVPSRFSGSGSGTEFTLTISSLQPEDFATYYCLQHNSYPL |
| | | | TFGGGTKVEIKSGGGGSEVQLVESGGGLVQPGGSLKLSCAASGFTFN |
| | | | KYAMNWVRQAPGKGLEWVARIRSKYNNYATYYADSVKDRFTISRDDS |
| | | | KNTAYLQMNNLKTEDTAVYYCVRHGNFGNSYISYWAYWGQGTLVTVS |
| | | | SGGGGSGGGGSGGGGSQTVVTQEPSLTVSPGGTVTLTCGSSTGAVTS |
| | | | GNYPNWVQQKPGQAPRGLIGGTKFLAPGTPARFSGSLLGGKAALTLS |
| | | | GVQPEDEAEYYCVLWYSNRWVFGGGTKLTVLGGGGDKTHTCPPCPAP |
| | | | ELLGGPSVFLFPPKPKDTLMISRTPEVTCVVVDVSHEDPEVKFNWYV |
| | | | DGVEVHNAKTKPCEEQYGSTYRCVSVLTVLHQDWLNGKEYKCKVSNK |
| | | | ALPAPIEKTISKAKGQPREPQVYTLPPSREEMTKNQVSLTCLVKGFY |
| | | | PSDIAVEWESNGQPENNYKTTPPVLDSDGSFFLYSKLTVDKSRWQQG |
| | | | NVFSCSVMHEALHNHYTQKSLSLSPGGGGSGGGGSGGGGSGGGGSGG |
| | | | GGSGGGGSDKTHTCPPCPAPELLGGPSVFLFPPKPKDTLMISRTPEV |
| | | | TCVVVDVSHEDPEVKFNWYVDGVEVHNAKTKPCEEQYGSTYRCVSVL |
| | | | TVLHQDWLNGKEYKCKVSNKALPAPIEKTISKAKGQPREPQVYTLPP |
| | | | SREEMTKNQVSLTCLVKGFYPSDIAVEWESNGQPENNYKTTPPVLDS |
| | | | DGSFFLYSKLTVDKSRWQQGNVFSCSVMHEALHNHYTQKSLSLSPGK |
| 579. | FL_13_CCxC | Bispecific | QVTLKESGPVLVKPTQTLTLTCTFSGFSLSNARMGVSWIRQPPGKCL |
| | D3- | HLE | EWLALIYWNDDKRYSPSLKSRLTITKDTSKNQVVLTMTNMDPVDTAT |
| | scFc_delGK | molecule | YYCARMVGYGSGWYAYFDYWGQGTLVTVSSGGGGSGGGGSGGGGSDI |
| | | | QMTQSPSSLSASVGDRVTITCRASQGIRNDLGWYQQKPGKAPKRLIY |
| | | | AASSLQSGVPSRFSGSGSGTEFTLTISSLQPEDFATYYCLQHNSYPL |
| | | | TFGCGTKVEIKSGGGGSEVQLVESGGGLVQPGGSLKLSCAASGFTFN |
| | | | KYAMNWVRQAPGKGLEWVARIRSKYNNYATYYADSVKDRFTISRDDS |
| | | | KNTAYLQMNNLKTEDTAVYYCVRHGNFGNSYISYWAYWGQGTLVTVS |
| | | | SGGGGSGGGGSGGGGSQTVVTQEPSLTVSPGGTVTLTCGSSTGAVTS |
| | | | GNYPNWVQQKPGQAPRGLIGGTKFLAPGTPARFSGSLLGGKAALTLS |
| | | | GVQPEDEAEYYCVLWYSNRWVFGGGTKLTVLGGGGDKTHTCPPCPAP |
| | | | ELLGGPSVFLFPPKPKDTLMISRTPEVTCVVVDVSHEDPEVKFNWYV |
| | | | DGVEVHNAKTKPCEEQYGSTYRCVSVLTVLHQDWLNGKEYKCKVSNK |
| | | | ALPAPIEKTISKAKGQPREPQVYTLPPSREEMTKNQVSLTCLVKGFY |
| | | | PSDIAVEWESNGQPENNYKTTPPVLDSDGSFFLYSKLTVDKSRWQQG |
| | | | NVFSCSVMHEALHNHYTQKSLSLSPGGGGSGGGGSGGGGSGGGGSGG |
| | | | GGSGGGGSDKTHTCPPCPAPELLGGPSVFLFPPKPKDTLMISRTPEV |
| | | | TCVVVDVSHEDPEVKFNWYVDGVEVHNAKTKPCEEQYGSTYRCVSVL |
| | | | TVLHQDWLNGKEYKCKVSNKALPAPIEKTISKAKGQPREPQVYTLPP |
| | | | SREEMTKNQVSLTCLVKGFYPSDIAVEWESNGQPENNYKTTPPVLDS |
| | | | DGSFFLYSKLTVDKSRWQQGNVFSCSVMHEALHNHYTQKSLSLSPGK |
| 580. | FL_14xCD3- | Bispecific | QVTLKESGPALVKPTQTLTLTCTFSGFSLSNARMGVSWIRQPPGKAL |
| | scFc_delGK | HLE | EWLAHIFSNDEKSYSTSLKSRLTISKDTSKSQVVLTMTDMDPEDTAT |
| | | molecule | YYCARIVGYGTGWYGFFDYWGQGILVTVSSGGGGSGGGGSGGGGSDI |
| | | | QMTQSPSSLSASVGDRVTITCRTSQGIRNDLGWYQQKPGKAPKRLIY |
| | | | AASSLQSGVPSRFSGSGSGTEFTLTISSLQPEDFATYYCLQHNSYPL |
| | | | TFGGGTKVEIKSGGGGSEVQLVESGGGLVQPGGSLKLSCAASGFTFN |
| | | | KYAMNWVRQAPGKGLEWVARIRSKYNNYATYYADSVKDRFTISRDDS |
| | | | KNTAYLQMNNLKTEDTAVYYCVRHGNFGNSYISYWAYWGQGTLVTVS |
| | | | SGGGGSGGGGSGGGGSQTVVTQEPSLTVSPGGTVTLTCGSSTGAVTS |
| | | | GNYPNWVQQKPGQAPRGLIGGTKFLAPGTPARFSGSLLGGKAALTLS |
| | | | GVQPEDEAEYYCVLWYSNRWVFGGGTKLTVLGGGGDKTHTCPPCPAP |
| | | | ELLGGPSVFLFPPKPKDTLMISRTPEVTCVVVDVSHEDPEVKFNWYV |
| | | | DGVEVHNAKTKPCEEQYGSTYRCVSVLTVLHQDWLNGKEYKCKVSNK |
| | | | ALPAPIEKTISKAKGQPREPQVYTLPPSREEMTKNQVSLTCLVKGFY |
| | | | PSDIAVEWESNGQPENNYKTTPPVLDSDGSFFLYSKLTVDKSRWQQG |
| | | | NVFSCSVMHEALHNHYTQKSLSLSPGGGGSGGGGSGGGGSGGGGSGG |
| | | | GGSGGGGSDKTHTCPPCPAPELLGGPSVFLFPPKPKDTLMISRTPEV |
| | | | TCVVVDVSHEDPEVKFNWYVDGVEVHNAKTKPCEEQYGSTYRCVSVL |
| | | | TVLHQDWLNGKEYKCKVSNKALPAPIEKTISKAKGQPREPQVYTLPP |
| | | | SREEMTKNQVSLTCLVKGFYPSDIAVEWESNGQPENNYKTTPPVLDS |
| | | | DGSFFLYSKLTVDKSRWQQGNVFSCSVMHEALHNHYTQKSLSLSPGK |
| 581. | FL_14_CCxC | Bispecific | QVTLKESGPALVKPTQTLTLTCTFSGFSLSNARMGVSWIRQPPGKCL |
| | D3- | HLE | EWLAHIFSNDEKSYSTSLKSRLTISKDTSKSQVVLTMTDMDPEDTAT |
| | scFc_delGK | molecule | YYCARIVGYGTGWYGFFDYWGQGILVTVSSGGGGSGGGGSGGGGSDI |
| | | | QMTQSPSSLSASVGDRVTITCRTSQGIRNDLGWYQQKPGKAPKRLIY |
| | | | AASSLQSGVPSRFSGSGSGTEFTLTISSLQPEDFATYYCLQHNSYPL |
| | | | TFGCGTKVEIKSGGGGSEVQLVESGGGLVQPGGSLKLSCAASGFTFN |
| | | | KYAMNWVRQAPGKGLEWVARIRSKYNNYATYYADSVKDRFTISRDDS |
| | | | KNTAYLQMNNLKTEDTAVYYCVRHGNFGNSYISYWAYWGQGTLVTVS |
| | | | SGGGGSGGGGSGGGGSQTVVTQEPSLTVSPGGTVTLTCGSSTGAVTS |
| | | | GNYPNWVQQKPGQAPRGLIGGTKFLAPGTPARFSGSLLGGKAALTLS |
| | | | GVQPEDEAEYYCVLWYSNRWVFGGGTKLTVLGGGGDKTHTCPPCPAP |
| | | | ELLGGPSVFLFPPKPKDTLMISRTPEVTCVVVDVSHEDPEVKFNWYV |
| | | | DGVEVHNAKTKPCEEQYGSTYRCVSVLTVLHQDWLNGKEYKCKVSNK |
| | | | ALPAPIEKTISKAKGQPREPQVYTLPPSREEMTKNQVSLTCLVKGFY |
| | | | PSDIAVEWESNGQPENNYKTTPPVLDSDGSFFLYSKLTVDKSRWQQG |
| | | | NVFSCSVMHEALHNHYTQKSLSLSPGGGGSGGGGSGGGGSGGGGSGG |
| | | | GGSGGGGSDKTHTCPPCPAPELLGGPSVFLFPPKPKDTLMISRTPEV |
| | | | TCVVVDVSHEDPEVKFNWYVDGVEVHNAKTKPCEEQYGSTYRCVSVL |
| | | | TVLHQDWLNGKEYKCKVSNKALPAPIEKTISKAKGQPREPQVYTLPP |
| | | | SREEMTKNQVSLTCLVKGFYPSDIAVEWESNGQPENNYKTTPPVLDS |
| | | | DGSFFLYSKLTVDKSRWQQGNVFSCSVMHEALHNHYTQKSLSLSPGK |
| 582. | FL_15xCD3- | Bispecific | QVQLVESGGGVVQPGRSLRLSCAASGFTFSSYGMHWVRQAPGKGLEW |
| | scFc_delGK | HLE | VAVISYEGSNEFYAESVKGRFTISRDNSKNTLYLQMNSLRAEDTAVY |
| | | molecule | YCARGGEITMVRGVIGYYYYGMDVWGQGTTVTVSSGGGGSGGGGSGG |
| | | | GGSDIQMTQSPSSLSASVGDRVTITCRASQSISSYLNWYQQKPGKAP |
| | | | KLLIYAASSLQSGVPSRFSGSGSGTEFTLTISSLQPEDFATYYCLQH |
| | | | NSYPLTFGGGTKVEIKSGGGGSEVQLVESGGGLVQPGGSLKLSCAAS |
| | | | GFTFNKYAMNWVRQAPGKGLEWVARIRSKYNNYATYYADSVKDRFTI |
| | | | SRDDSKNTAYLQMNNLKTEDTAVYYCVRHGNFGNSYISYWAYWGQGT |
| | | | LVTVSSGGGGSGGGGSGGGGSQTVVTQEPSLTVSPGGTVTLTCGSST |
| | | | GAVTSGNYPNWVQQKPGQAPRGLIGGTKFLAPGTPARFSGSLLGGKA |
| | | | ALTLSGVQPEDEAEYYCVLWYSNRWVFGGGTKLTVLGGGGDKTHTCP |
| | | | PCPAPELLGGPSVFLFPPKPKDTLMISRTPEVTCVVVDVSHEDPEVK |
| | | | FNWYVDGVEVHNAKTKPCEEQYGSTYRCVSVLTVLHQDWLNGKEYKC |
| | | | KVSNKALPAPIEKTISKAKGQPREPQVYTLPPSREEMTKNQVSLTCL |
| | | | VKGFYPSDIAVEWESNGQPENNYKTTPPVLDSDGSFFLYSKLTVDKS |
| | | | RWQQGNVFSCSVMHEALHNHYTQKSLSLSPGGGGSGGGGSGGGGSGG |
| | | | GGSGGGGSGGGGSDKTHTCPPCPAPELLGGPSVFLFPPKPKDTLMIS |
| | | | RTPEVTCVVVDVSHEDPEVKFNWYVDGVEVHNAKTKPCEEQYGSTYR |
| | | | CVSVLTVLHQDWLNGKEYKCKVSNKALPAPIEKTISKAKGQPREPQV |
| | | | YTLPPSREEMTKNQVSLTCLVKGFYPSDIAVEWESNGQPENNYKTTP |
| | | | PVLDSDGSFFLYSKLTVDKSRWQQGNVFSCSVMHEALHNHYTQKSLS |
| | | | LSPGK |
| 583. | FL_15_CCxC | Bispecific | QVQLVESGGGVVQPGRSLRLSCAASGFTFSSYGMHWVRQAPGKCLEW |
| | D3- | HLE | VAVISYEGSNEFYAESVKGRFTISRDNSKNTLYLQMNSLRAEDTAVY |
| | scFc_delGK | molecule | YCARGGEITMVRGVIGYYYYGMDVWGQGTTVTVSSGGGGSGGGGSGG |
| | | | GGSDIQMTQSPSSLSASVGDRVTITCRASQSISSYLNWYQQKPGKAP |
| | | | KLLIYAASSLQSGVPSRFSGSGSGTEFTLTISSLQPEDFATYYCLQH |
| | | | NSYPLTFGCGTKVEIKSGGGGSEVQLVESGGGLVQPGGSLKLSCAAS |
| | | | GFTFNKYAMNWVRQAPGKGLEWVARIRSKYNNYATYYADSVKDRFTI |
| | | | SRDDSKNTAYLQMNNLKTEDTAVYYCVRHGNFGNSYISYWAYWGQGT |
| | | | LVTVSSGGGGSGGGGSGGGGSQTVVTQEPSLTVSPGGTVTLTCGSST |
| | | | GAVTSGNYPNWVQQKPGQAPRGLIGGTKFLAPGTPARFSGSLLGGKA |
| | | | ALTLSGVQPEDEAEYYCVLWYSNRWVFGGGTKLTVLGGGGDKTHTCP |
| | | | PCPAPELLGGPSVFLFPPKPKDTLMISRTPEVTCVVVDVSHEDPEVK |
| | | | FNWYVDGVEVHNAKTKPCEEQYGSTYRCVSVLTVLHQDWLNGKEYKC |
| | | | KVSNKALPAPIEKTISKAKGQPREPQVYTLPPSREEMTKNQVSLTCL |
| | | | VKGFYPSDIAVEWESNGQPENNYKTTPPVLDSDGSFFLYSKLTVDKS |
| | | | RWQQGNVFSCSVMHEALHNHYTQKSLSLSPGGGGSGGGGSGGGGSGG |
| | | | GGSGGGGSGGGGSDKTHTCPPCPAPELLGGPSVFLFPPKPKDTLMIS |
| | | | RTPEVTCVVVDVSHEDPEVKFNWYVDGVEVHNAKTKPCEEQYGSTYR |
| | | | CVSVLTVLHQDWLNGKEYKCKVSNKALPAPIEKTISKAKGQPREPQV |
| | | | YTLPPSREEMTKNQVSLTCLVKGFYPSDIAVEWESNGQPENNYKTTP |
| | | | PVLDSDGSFFLYSKLTVDKSRWQQGNVFSCSVMHEALHNHYTQKSLS |
| | | | LSPGK |
| 584. | CD70_1_CCx | VH CDR1 | SYAMS |
| | CD3-scFc | | |
| 585. | CD70_1_CCx | VH CDR2 | VISGSGGRPNYAESVKG |
| | CD3-scFc | | |
| 586. | CD70_1_CCx | VH CDR3 | VDYSNYLFFDY |
| | CD3-scFc | | |
| 587. | CD70_1_CCx | VL CDR1 | RAGQSVRSSYLG |
| | CD3-scFc | | |
| 588. | CD70_1_CCx | VL CDR2 | GASSRAT |
| | CD3-scFc | | |
| 589. | CD70_1_CCx | VL CDR3 | QQYGYSPPT |
| | CD3-scFc | | |
| 590. | CD70_1_CCx | VH | EVQLLESGGGLVQPGGSLRLSCAASGFTFSSYAMSWVRQAPGKCLEW |
| | CD3-scFc | | VSVISGSGGRPNYAESVKGRFTISRDNSKNTLYLQMNSLRDEDTAVY |
| | | | YCAKVDYSNYLFFDYWGQGTLVTVSS |
| 591. | CD70_1_CCx | VL | EIVLTQSPGTLSLSPGEGATLSCRAGQSVRSSYLGWYQQKPGQAPRL |
| | CD3-scFc | | LIYGASSRATGIPDRFSGSGSGTDFTLTISRLEPEDFAVYYCQQYGY |
| | | | SPPTFGCGTKLEIK |
| 592. | CD70_1_CCx | scFv | EVQLLESGGGLVQPGGSLRLSCAASGFTFSSYAMSWVRQAPGKCLEW |
| | CD3-scFc | | VSVISGSGGRPNYAESVKGRFTISRDNSKNTLYLQMNSLRDEDTAVY |
| | | | YCAKVDYSNYLFFDYWGQGTLVTVSSGGGGSGGGGSGGGGSEIVLTQ |
| | | | SPGTLSLSPGEGATLSCRAGQSVRSSYLGWYQQKPGQAPRLLIYGAS |
| | | | SRATGIPDRFSGSGSGTDFTLTISRLEPEDFAVYYCQQYGYSPPTFG |
| | | | CGTKLEIK |
| 593. | CD70_1_CCx | bispecific | EVQLLESGGGLVQPGGSLRLSCAASGFTFSSYAMSWVRQAPGKCLEW |
| | CD3-scFc | molecule | VSVISGSGGRPNYAESVKGRFTISRDNSKNTLYLQMNSLRDEDTAVY |
| | | | YCAKVDYSNYLFFDYWGQGTLVTVSSGGGGSGGGGSGGGGSEIVLTQ |
| | | | SPGTLSLSPGEGATLSCRAGQSVRSSYLGWYQQKPGQAPRLLIYGAS |
| | | | SRATGIPDRFSGSGSGTDFTLTISRLEPEDFAVYYCQQYGYSPPTFG |
| | | | CGTKLEIKSGGGGSEVQLVESGGGLVQPGGSLKLSCAASGFTFNKYA |
| | | | MNWVRQAPGKGLEWVARIRSKYNNYATYYADSVKDRFTISRDDSKNT |
| | | | AYLQMNNLKTEDTAVYYCVRHGNFGNSYISYWAYWGQGTLVTVSSGG |
| | | | GGSGGGGSGGGGSQTVVTQEPSLTVSPGGTVTLTCGSSTGAVTSGNY |
| | | | PNWVQQKPGQAPRGLIGGTKFLAPGTPARFSGSLLGGKAALTLSGVQ |
| | | | PEDEAEYYCVLWYSNRWVFGGGTKLTVL |
| 594. | CD70_1_CCx | bispecific | EVQLLESGGGLVQPGGSLRLSCAASGFTFSSYAMSWVRQAPGKCLEW |
| | CD3-scFc | HLE | VSVISGSGGRPNYAESVKGRFTISRDNSKNTLYLQMNSLRDEDTAVY |
| | | molecule | YCAKVDYSNYLFFDYWGQGTLVTVSSGGGGSGGGGSGGGGSEIVLTQ |
| | | | SPGTLSLSPGEGATLSCRAGQSVRSSYLGWYQQKPGQAPRLLIYGAS |
| | | | SRATGIPDRFSGSGSGTDFTLTISRLEPEDFAVYYCQQYGYSPPTFG |
| | | | CGTKLEIKSGGGGSEVQLVESGGGLVQPGGSLKLSCAASGFTFNKYA |
| | | | MNWVRQAPGKGLEWVARIRSKYNNYATYYADSVKDRFTISRDDSKNT |
| | | | AYLQMNNLKTEDTAVYYCVRHGNFGNSYISYWAYWGQGTLVTVSSGG |
| | | | GGSGGGGSGGGGSQTVVTQEPSLTVSPGGTVTLTCGSSTGAVTSGNY |
| | | | PNWVQQKPGQAPRGLIGGTKFLAPGTPARFSGSLLGGKAALTLSGVQ |
| | | | PEDEAEYYCVLWYSNRWVFGGGTKLTVLGGGGDKTHTCPPCPAPELL |
| | | | GGPSVFLFPPKPKDTLMISRTPEVTCVVVDVSHEDPEVKFNWYVDGV |
| | | | EVHNAKTKPCEEQYGSTYRCVSVLTVLHQDWLNGKEYKCKVSNKALP |
| | | | APIEKTISKAKGQPREPQVYTLPPSREEMTKNQVSLTCLVKGFYPSD |
| | | | IAVEWESNGQPENNYKTTPPVLDSDGSFFLYSKLTVDKSRWQQGNVF |
| | | | SCSVMHEALHNHYTQKSLSLSPGKGGGGSGGGGSGGGGSGGGGSGGG |
| | | | GSGGGGSDKTHTCPPCPAPELLGGPSVFLFPPKPKDTLMISRTPEVT |
| | | | CVVVDVSHEDPEVKFNWYVDGVEVHNAKTKPCEEQYGSTYRCVSVLT |
| | | | VLHQDWLNGKEYKCKVSNKALPAPIEKTISKAKGQPREPQVYTLPPS |
| | | | REEMTKNQVSLTCLVKGFYPSDIAVEWESNGQPENNYKTTPPVLDSD |
| | | | GSFFLYSKLTVDKSRWQQGNVFSCSVMHEALHNHYTQKSLSLSPGK |
| 595. | CD70_1xCD3- | VH | EVQLLESGGGLVQPGGSLRLSCAASGFTFSSYAMSWVRQAPGKGLEW |
| | scFc | | VSVISGSGGRPNYAESVKGRFTISRDNSKNTLYLQMNSLRDEDTAVY |
| | | | YCAKVDYSNYLFFDYWGQGTLVTVSS |
| 596. | CD70_1xCD3- | VL | EIVLTQSPGTLSLSPGEGATLSCRAGQSVRSSYLGWYQQKPGQAPRL |
| | scFc | | LIYGASSRATGIPDRFSGSGSGTDFTLTISRLEPEDFAVYYCQQYGY |
| | | | SPPTFGGGTKLEIK |
| 597. | CD70_1xCD3- | scFv | EVQLLESGGGLVQPGGSLRLSCAASGFTFSSYAMSWVRQAPGKGLEW |
| | scFc | | VSVISGSGGRPNYAESVKGRFTISRDNSKNTLYLQMNSLRDEDTAVY |
| | | | YCAKVDYSNYLFFDYWGQGTLVTVSSGGGGSGGGGSGGGGSEIVLTQ |
| | | | SPGTLSLSPGEGATLSCRAGQSVRSSYLGWYQQKPGQAPRLLIYGAS |
| | | | SRATGIPDRFSGSGSGTDFTLTISRLEPEDFAVYYCQQYGYSPPTFG |
| | | | GGTKLEIK |
| 598. | CD70_1xCD3- | bispecific | EVQLLESGGGLVQPGGSLRLSCAASGFTFSSYAMSWVRQAPGKGLEW |
| | scFc | molecule | VSVISGSGGRPNYAESVKGRFTISRDNSKNTLYLQMNSLRDEDTAVY |
| | | | YCAKVDYSNYLFFDYWGQGTLVTVSSGGGGSGGGGSGGGGSEIVLTQ |
| | | | SPGTLSLSPGEGATLSCRAGQSVRSSYLGWYQQKPGQAPRLLIYGAS |
| | | | SRATGIPDRFSGSGSGTDFTLTISRLEPEDFAVYYCQQYGYSPPTFG |
| | | | GGTKLEIKSGGGGSEVQLVESGGGLVQPGGSLKLSCAASGFTFNKYA |
| | | | MNWVRQAPGKGLEWVARIRSKYNNYATYYADSVKDRFTISRDDSKNT |
| | | | AYLQMNNLKTEDTAVYYCVRHGNFGNSYISYWAYWGQGTLVTVSSGG |
| | | | GGSGGGGSGGGGSQTVVTQEPSLTVSPGGTVTLTCGSSTGAVTSGNY |
| | | | PNWVQQKPGQAPRGLIGGTKFLAPGTPARFSGSLLGGKAALTLSGVQ |
| | | | PEDEAEYYCVLWYSNRWVFGGGTKLTVL |
| 599. | CD70_1xCD3- | bispecific | EVQLLESGGGLVQPGGSLRLSCAASGFTFSSYAMSWVRQAPGKGLEW |
| | scFc | HLE | VSVISGSGGRPNYAESVKGRFTISRDNSKNTLYLQMNSLRDEDTAVY |
| | | molecule | YCAKVDYSNYLFFDYWGQGTLVTVSSGGGGSGGGGSGGGGSEIVLTQ |
| | | | SPGTLSLSPGEGATLSCRAGQSVRSSYLGWYQQKPGQAPRLLIYGAS |
| | | | SRATGIPDRFSGSGSGTDFTLTISRLEPEDFAVYYCQQYGYSPPTFG |
| | | | GGTKLEIKSGGGGSEVQLVESGGGLVQPGGSLKLSCAASGFTFNKYA |
| | | | MNWVRQAPGKGLEWVARIRSKYNNYATYYADSVKDRFTISRDDSKNT |
| | | | AYLQMNNLKTEDTAVYYCVRHGNFGNSYISYWAYWGQGTLVTVSSGG |
| | | | GGSGGGGSGGGGSQTVVTQEPSLTVSPGGTVTLTCGSSTGAVTSGNY |
| | | | PNWVQQKPGQAPRGLIGGTKFLAPGTPARFSGSLLGGKAALTLSGVQ |
| | | | PEDEAEYYCVLWYSNRWVFGGGTKLTVLGGGGDKTHTCPPCPAPELL |
| | | | GGPSVFLFPPKPKDTLMISRTPEVTCVVVDVSHEDPEVKFNWYVDGV |
| | | | EVHNAKTKPCEEQYGSTYRCVSVLTVLHQDWLNGKEYKCKVSNKALP |
| | | | APIEKTISKAKGQPREPQVYTLPPSREEMTKNQVSLTCLVKGFYPSD |
| | | | IAVEWESNGQPENNYKTTPPVLDSDGSFFLYSKLTVDKSRWQQGNVF |
| | | | SCSVMHEALHNHYTQKSLSLSPGKGGGGSGGGGSGGGGSGGGGSGGG |
| | | | GSGGGGSDKTHTCPPCPAPELLGGPSVFLFPPKPKDTLMISRTPEVT |
| | | | CVVVDVSHEDPEVKFNWYVDGVEVHNAKTKPCEEQYGSTYRCVSVLT |
| | | | VLHQDWLNGKEYKCKVSNKALPAPIEKTISKAKGQPREPQVYTLPPS |
| | | | REEMTKNQVSLTCLVKGFYPSDIAVEWESNGQPENNYKTTPPVLDSD |
| | | | GSFFLYSKLTVDKSRWQQGNVFSCSVMHEALHNHYTQKSLSLSPGK |
| 600. | CD70_2_CCx | VH CDR1 | IYAMS |
| | CD3-scFc | | |
| 601. | CD70_2_CCx | VH CDR2 | AISGSGGSTFYAESVKG |
| | CD3-scFc | | |
| 602. | CD70_2_CCx | VH CDR3 | HDYSNYPYFDY |
| | CD3-scFc | | |
| 603. | CD70_2_CCx | VL CDR1 | RASQSVRSSYLA |
| | CD3-scFc | | |
| 604. | CD70_2_CCx | VL CDR2 | GASSRAT |
| | CD3-scFc | | |
| 605. | CD70_2_CCx | VL CDR3 | QQYGDLPFT |
| | CD3-scFc | | |
| 606. | CD70_2_CCx | VH | EVQLLESGGGLVQPGGSLKLSCAASGFTFSIYAMSWVRQAPGKCLEW |
| | CD3-scFc | | VSAISGSGGSTFYAESVKGRFTISRDNSKNTLYLQMNSLRAEDTAVY |
| | | | YCAKHDYSNYPYFDYWGQGTLVTVSS |
| 607. | CD70_2_CCx | VL | EIVLTQSPGTLSLSPGERATLSCRASQSVRSSYLAWYQQKPGQAPRL |
| | CD3-scFc | | LIYGASSRATGIPDRFSGSGSGTDFTLTISRLEPEDFAVYYCQQYGD |
| | | | LPFTFGCGTKLEIK |
| 608. | CD70_2_CCx | scFv | EVQLLESGGGLVQPGGSLKLSCAASGFTFSIYAMSWVRQAPGKCLEW |
| | CD3-scFc | | VSAISGSGGSTFYAESVKGRFTISRDNSKNTLYLQMNSLRAEDTAVY |
| | | | YCAKHDYSNYPYFDYWGQGTLVTVSSGGGGSGGGGSGGGGSEIVLTQ |
| | | | SPGTLSLSPGERATLSCRASQSVRSSYLAWYQQKPGQAPRLLIYGAS |
| | | | SRATGIPDRFSGSGSGTDFTLTISRLEPEDFAVYYCQQYGDLPFTFG |
| | | | CGTKLEIK |
| 609. | CD70_2_CCx | bispecific | EVQLLESGGGLVQPGGSLKLSCAASGFTFSIYAMSWVRQAPGKCLEW |
| | CD3-scFc | molecule | VSAISGSGGSTFYAESVKGRFTISRDNSKNTLYLQMNSLRAEDTAVY |
| | | | YCAKHDYSNYPYFDYWGQGTLVTVSSGGGGSGGGGSGGGGSEIVLTQ |
| | | | SPGTLSLSPGERATLSCRASQSVRSSYLAWYQQKPGQAPRLLIYGAS |
| | | | SRATGIPDRFSGSGSGTDFTLTISRLEPEDFAVYYCQQYGDLPFTFG |
| | | | CGTKLEIKSGGGGSEVQLVESGGGLVQPGGSLKLSCAASGFTFNKYA |
| | | | MNWVRQAPGKGLEWVARIRSKYNNYATYYADSVKDRFTISRDDSKNT |
| | | | AYLQMNNLKTEDTAVYYCVRHGNFGNSYISYWAYWGQGTLVTVSSGG |
| | | | GGSGGGGSGGGGSQTVVTQEPSLTVSPGGTVTLTCGSSTGAVTSGNY |
| | | | PNWVQQKPGQAPRGLIGGTKFLAPGTPARFSGSLLGGKAALTLSGVQ |
| | | | PEDEAEYYCVLWYSNRWVFGGGTKLTVL |
| 610. | CD70_2_CCx | bispecific | EVQLLESGGGLVQPGGSLKLSCAASGFTFSIYAMSWVRQAPGKCLEW |
| | CD3-scFc | HLE | VSAISGSGGSTFYAESVKGRFTISRDNSKNTLYLQMNSLRAEDTAVY |
| | | molecule | YCAKHDYSNYPYFDYWGQGTLVTVSSGGGGSGGGGSGGGGSEIVLTQ |
| | | | SPGTLSLSPGERATLSCRASQSVRSSYLAWYQQKPGQAPRLLIYGAS |
| | | | SRATGIPDRFSGSGSGTDFTLTISRLEPEDFAVYYCQQYGDLPFTFG |
| | | | CGTKLEIKSGGGGSEVQLVESGGGLVQPGGSLKLSCAASGFTFNKYA |
| | | | MNWVRQAPGKGLEWVARIRSKYNNYATYYADSVKDRFTISRDDSKNT |
| | | | AYLQMNNLKTEDTAVYYCVRHGNFGNSYISYWAYWGQGTLVTVSSGG |
| | | | GGSGGGGSGGGGSQTVVTQEPSLTVSPGGTVTLTCGSSTGAVTSGNY |
| | | | PNWVQQKPGQAPRGLIGGTKFLAPGTPARFSGSLLGGKAALTLSGVQ |
| | | | PEDEAEYYCVLWYSNRWVFGGGTKLTVLGGGGDKTHTCPPCPAPELL |
| | | | GGPSVFLFPPKPKDTLMISRTPEVTCVVVDVSHEDPEVKFNWYVDGV |
| | | | EVHNAKTKPCEEQYGSTYRCVSVLTVLHQDWLNGKEYKCKVSNKALP |
| | | | APIEKTISKAKGQPREPQVYTLPPSREEMTKNQVSLTCLVKGFYPSD |
| | | | IAVEWESNGQPENNYKTTPPVLDSDGSFFLYSKLTVDKSRWQQGNVF |
| | | | SCSVMHEALHNHYTQKSLSLSPGKGGGGSGGGGSGGGGSGGGGSGGG |
| | | | GSGGGGSDKTHTCPPCPAPELLGGPSVFLFPPKPKDTLMISRTPEVT |
| | | | CVVVDVSHEDPEVKFNWYVDGVEVHNAKTKPCEEQYGSTYRCVSVLT |
| | | | VLHQDWLNGKEYKCKVSNKALPAPIEKTISKAKGQPREPQVYTLPPS |
| | | | REEMTKNQVSLTCLVKGFYPSDIAVEWESNGQPENNYKTTPPVLDSD |
| | | | GSFFLYSKLTVDKSRWQQGNVFSCSVMHEALHNHYTQKSLSLSPGK |
| 611. | CD70_2xCD3- | VH | EVQLLESGGGLVQPGGSLKLSCAASGFTFSIYAMSWVRQAPGKGLEW |
| | scFc | | VSAISGSGGSTFYAESVKGRFTISRDNSKNTLYLQMNSLRAEDTAVY |
| | | | YCAKHDYSNYPYFDYWGQGTLVTVSS |
| 612. | CD70_2xCD3- | VL | EIVLTQSPGTLSLSPGERATLSCRASQSVRSSYLAWYQQKPGQAPRL |
| | scFc | | LIYGASSRATGIPDRFSGSGSGTDFTLTISRLEPEDFAVYYCQQYGD |
| | | | LPFTFGPGTKLEIK |
| 613. | CD70_2xCD3- | scFv | EVQLLESGGGLVQPGGSLKLSCAASGFTFSIYAMSWVRQAPGKGLEW |
| | scFc | | VSAISGSGGSTFYAESVKGRFTISRDNSKNTLYLQMNSLRAEDTAVY |
| | | | YCAKHDYSNYPYFDYWGQGTLVTVSSGGGGSGGGGSGGGGSEIVLTQ |
| | | | SPGTLSLSPGERATLSCRASQSVRSSYLAWYQQKPGQAPRLLIYGAS |
| | | | SRATGIPDRFSGSGSGTDFTLTISRLEPEDFAVYYCQQYGDLPFTFG |
| | | | PGTKLEIK |
| 614. | CD70_2xCD3- | bispecific | EVQLLESGGGLVQPGGSLKLSCAASGFTFSIYAMSWVRQAPGKGLEW |
| | scFc | molecule | VSAISGSGGSTFYAESVKGRFTISRDNSKNTLYLQMNSLRAEDTAVY |
| | | | YCAKHDYSNYPYFDYWGQGTLVTVSSGGGGSGGGGSGGGGSEIVLTQ |
| | | | SPGTLSLSPGERATLSCRASQSVRSSYLAWYQQKPGQAPRLLIYGAS |
| | | | SRATGIPDRFSGSGSGTDFTLTISRLEPEDFAVYYCQQYGDLPFTFG |
| | | | PGTKLEIKSGGGGSEVQLVESGGGLVQPGGSLKLSCAASGFTFNKYA |
| | | | MNWVRQAPGKGLEWVARIRSKYNNYATYYADSVKDRFTISRDDSKNT |
| | | | AYLQMNNLKTEDTAVYYCVRHGNFGNSYISYWAYWGQGTLVTVSSGG |
| | | | GGSGGGGSGGGGSQTVVTQEPSLTVSPGGTVTLTCGSSTGAVTSGNY |
| | | | PNWVQQKPGQAPRGLIGGTKFLAPGTPARFSGSLLGGKAALTLSGVQ |
| | | | PEDEAEYYCVLWYSNRWVFGGGTKLTVL |
| 615. | CD70_2xCD3- | bispecific | EVQLLESGGGLVQPGGSLKLSCAASGFTFSIYAMSWVRQAPGKGLEW |
| | scFc | HLE | VSAISGSGGSTFYAESVKGRFTISRDNSKNTLYLQMNSLRAEDTAVY |
| | | molecule | YCAKHDYSNYPYFDYWGQGTLVTVSSGGGGSGGGGSGGGGSEIVLTQ |
| | | | SPGTLSLSPGERATLSCRASQSVRSSYLAWYQQKPGQAPRLLIYGAS |
| | | | SRATGIPDRFSGSGSGTDFTLTISRLEPEDFAVYYCQQYGDLPFTFG |
| | | | PGTKLEIKSGGGGSEVQLVESGGGLVQPGGSLKLSCAASGFTFNKYA |
| | | | MNWVRQAPGKGLEWVARIRSKYNNYATYYADSVKDRFTISRDDSKNT |
| | | | AYLQMNNLKTEDTAVYYCVRHGNFGNSYISYWAYWGQGTLVTVSSGG |
| | | | GGSGGGGSGGGGSQTVVTQEPSLTVSPGGTVTLTCGSSTGAVTSGNY |
| | | | PNWVQQKPGQAPRGLIGGTKFLAPGTPARFSGSLLGGKAALTLSGVQ |
| | | | PEDEAEYYCVLWYSNRWVFGGGTKLTVLGGGGDKTHTCPPCPAPELL |
| | | | GGPSVFLFPPKPKDTLMISRTPEVTCVVVDVSHEDPEVKFNWYVDGV |
| | | | EVHNAKTKPCEEQYGSTYRCVSVLTVLHQDWLNGKEYKCKVSNKALP |
| | | | APIEKTISKAKGQPREPQVYTLPPSREEMTKNQVSLTCLVKGFYPSD |
| | | | IAVEWESNGQPENNYKTTPPVLDSDGSFFLYSKLTVDKSRWQQGNVF |
| | | | SCSVMHEALHNHYTQKSLSLSPGKGGGGSGGGGSGGGGSGGGGSGGG |
| | | | GSGGGGSDKTHTCPPCPAPELLGGPSVFLFPPKPKDTLMISRTPEVT |
| | | | CVVVDVSHEDPEVKFNWYVDGVEVHNAKTKPCEEQYGSTYRCVSVLT |
| | | | VLHQDWLNGKEYKCKVSNKALPAPIEKTISKAKGQPREPQVYTLPPS |
| | | | REEMTKNQVSLTCLVKGFYPSDIAVEWESNGQPENNYKTTPPVLDSD |
| | | | GSFFLYSKLTVDKSRWQQGNVFSCSVMHEALHNHYTQKSLSLSPGK |
| 616. | CD70_3_CCx | VH CDR1 | SYAMS |
| | CD3-scFc | | |
| 617. | CD70_3_CCx | VH CDR2 | AISGSGGRTFYAESVEG |
| | CD3-scFc | | |
| 618. | CD70_3_CCx | VH CDR3 | HDYSNYPYFDY |
| | CD3-scFc | | |
| 619. | CD70_3_CCx | VL CDR1 | RASQSVRSSYLA |
| | CD3-scFc | | |
| 620. | CD70_3_CCx | VL CDR2 | GASSRAT |
| | CD3-scFc | | |
| 621. | CD70_3_CCx | VL CDR3 | QQYGSSPFT |
| | CD3-scFc | | |
| 622. | CD70_3_CCx | VH | EVQLLESGGGMVQPGGSLRLSCAASGFTFSSYAMSWVRQAPGKCLEW |
| | CD3-scFc | | VSAISGSGGRTFYAESVEGRFTISRDNSKNTLFLQMNSLRAEDTAVY |
| | | | YCAKHDYSNYPYFDYWGQGTLVTVSS |
| 623. | CD70_3_CCx | VL | EIVLTQSPGTLSLSPGERATLSCRASQSVRSSYLAWYQQKPGQAPRL |
| | CD3-scFc | | LIYGASSRATGIPDRFSGSGSGTDFTLTISRLEPEDFAVYYCQQYGS |
| | | | SPFTFGCGTKLEIK |
| 624. | CD70_3_CCx | scFv | EVQLLESGGGMVQPGGSLRLSCAASGFTFSSYAMSWVRQAPGKCLEW |
| | CD3-scFc | | VSAISGSGGRTFYAESVEGRFTISRDNSKNTLFLQMNSLRAEDTAVY |
| | | | YCAKHDYSNYPYFDYWGQGTLVTVSSGGGGSGGGGSGGGGSEIVLTQ |
| | | | SPGTLSLSPGERATLSCRASQSVRSSYLAWYQQKPGQAPRLLIYGAS |
| | | | SRATGIPDRFSGSGSGTDFTLTISRLEPEDFAVYYCQQYGSSPFTFG |
| | | | CGTKLEIK |
| 625. | CD70_3_CCx | bispecific | EVQLLESGGGMVQPGGSLRLSCAASGFTFSSYAMSWVRQAPGKCLEW |
| | CD3-scFc | molecule | VSAISGSGGRTFYAESVEGRFTISRDNSKNTLFLQMNSLRAEDTAVY |
| | | | YCAKHDYSNYPYFDYWGQGTLVTVSSGGGGSGGGGSGGGGSEIVLTQ |
| | | | SPGTLSLSPGERATLSCRASQSVRSSYLAWYQQKPGQAPRLLIYGAS |
| | | | SRATGIPDRFSGSGSGTDFTLTISRLEPEDFAVYYCQQYGSSPFTFG |
| | | | CGTKLEIKSGGGGSEVQLVESGGGLVQPGGSLKLSCAASGFTFNKYA |
| | | | MNWVRQAPGKGLEWVARIRSKYNNYATYYADSVKDRFTISRDDSKNT |
| | | | AYLQMNNLKTEDTAVYYCVRHGNFGNSYISYWAYWGQGTLVTVSSGG |
| | | | GGSGGGGSGGGGSQTVVTQEPSLTVSPGGTVTLTCGSSTGAVTSGNY |
| | | | PNWVQQKPGQAPRGLIGGTKFLAPGTPARFSGSLLGGKAALTLSGVQ |
| | | | PEDEAEYYCVLWYSNRWVFGGGTKLTVL |
| 626. | CD70_3_CCx | bispecific | EVQLLESGGGMVQPGGSLRLSCAASGFTFSSYAMSWVRQAPGKCLEW |
| | CD3-scFc | HLE | VSAISGSGGRTFYAESVEGRFTISRDNSKNTLFLQMNSLRAEDTAVY |
| | | molecule | YCAKHDYSNYPYFDYWGQGTLVTVSSGGGGSGGGGSGGGGSEIVLTQ |
| | | | SPGTLSLSPGERATLSCRASQSVRSSYLAWYQQKPGQAPRLLIYGAS |
| | | | SRATGIPDRFSGSGSGTDFTLTISRLEPEDFAVYYCQQYGSSPFTFG |
| | | | CGTKLEIKSGGGGSEVQLVESGGGLVQPGGSLKLSCAASGFTFNKYA |
| | | | MNWVRQAPGKGLEWVARIRSKYNNYATYYADSVKDRFTISRDDSKNT |
| | | | AYLQMNNLKTEDTAVYYCVRHGNFGNSYISYWAYWGQGTLVTVSSGG |
| | | | GGSGGGGSGGGGSQTVVTQEPSLTVSPGGTVTLTCGSSTGAVTSGNY |
| | | | PNWVQQKPGQAPRGLIGGTKFLAPGTPARFSGSLLGGKAALTLSGVQ |
| | | | PEDEAEYYCVLWYSNRWVFGGGTKLTVLGGGGDKTHTCPPCPAPELL |
| | | | GGPSVFLFPPKPKDTLMISRTPEVTCVVVDVSHEDPEVKFNWYVDGV |
| | | | EVHNAKTKPCEEQYGSTYRCVSVLTVLHQDWLNGKEYKCKVSNKALP |
| | | | APIEKTISKAKGQPREPQVYTLPPSREEMTKNQVSLTCLVKGFYPSD |
| | | | IAVEWESNGQPENNYKTTPPVLDSDGSFFLYSKLTVDKSRWQQGNVF |
| | | | SCSVMHEALHNHYTQKSLSLSPGKGGGGSGGGGSGGGGSGGGGSGGG |
| | | | GSGGGGSDKTHTCPPCPAPELLGGPSVFLFPPKPKDTLMISRTPEVT |
| | | | CVVVDVSHEDPEVKFNWYVDGVEVHNAKTKPCEEQYGSTYRCVSVLT |
| | | | VLHQDWLNGKEYKCKVSNKALPAPIEKTISKAKGQPREPQVYTLPPS |
| | | | REEMTKNQVSLTCLVKGFYPSDIAVEWESNGQPENNYKTTPPVLDSD |
| | | | GSFFLYSKLTVDKSRWQQGNVFSCSVMHEALHNHYTQKSLSLSPGK |
| 627. | CD70_3xCD3- | VH | EVQLLESGGGMVQPGGSLRLSCAASGFTFSSYAMSWVRQAPGKGLEW |
| | scFc | | VSAISGSGGRTFYAESVEGRFTISRDNSKNTLFLQMNSLRAEDTAVY |
| | | | YCAKHDYSNYPYFDYWGQGTLVTVSS |
| 628. | CD70_3xCD3- | VL | EIVLTQSPGTLSLSPGERATLSCRASQSVRSSYLAWYQQKPGQAPRL |
| | scFc | | LIYGASSRATGIPDRFSGSGSGTDFTLTISRLEPEDFAVYYCQQYGS |
| | | | SPFTFGPGTKLEIK |
| 629. | CD70_3xCD3- | scFv | EVQLLESGGGMVQPGGSLRLSCAASGFTFSSYAMSWVRQAPGKGLEW |
| | scFc | | VSAISGSGGRTFYAESVEGRFTISRDNSKNTLFLQMNSLRAEDTAVY |
| | | | YCAKHDYSNYPYFDYWGQGTLVTVSSGGGGSGGGGSGGGGSEIVLTQ |
| | | | SPGTLSLSPGERATLSCRASQSVRSSYLAWYQQKPGQAPRLLIYGAS |
| | | | SRATGIPDRFSGSGSGTDFTLTISRLEPEDFAVYYCQQYGSSPFTFG |
| | | | PGTKLEIK |
| 630. | CD70_3xCD3- | bispecific | EVQLLESGGGMVQPGGSLRLSCAASGFTFSSYAMSWVRQAPGKGLEW |
| | scFc | molecule | VSAISGSGGRTFYAESVEGRFTISRDNSKNTLFLQMNSLRAEDTAVY |
| | | | YCAKHDYSNYPYFDYWGQGTLVTVSSGGGGSGGGGSGGGGSEIVLTQ |
| | | | SPGTLSLSPGERATLSCRASQSVRSSYLAWYQQKPGQAPRLLIYGAS |
| | | | SRATGIPDRFSGSGSGTDFTLTISRLEPEDFAVYYCQQYGSSPFTFG |
| | | | PGTKLEIKSGGGGSEVQLVESGGGLVQPGGSLKLSCAASGFTFNKYA |
| | | | MNWVRQAPGKGLEWVARIRSKYNNYATYYADSVKDRFTISRDDSKNT |
| | | | AYLQMNNLKTEDTAVYYCVRHGNFGNSYISYWAYWGQGTLVTVSSGG |
| | | | GGSGGGGSGGGGSQTVVTQEPSLTVSPGGTVTLTCGSSTGAVTSGNY |
| | | | PNWVQQKPGQAPRGLIGGTKFLAPGTPARFSGSLLGGKAALTLSGVQ |
| | | | PEDEAEYYCVLWYSNRWVFGGGTKLTVL |
| 631. | CD70_3xCD3- | bispecific | EVQLLESGGGMVQPGGSLRLSCAASGFTFSSYAMSWVRQAPGKGLEW |
| | scFc | HLE | VSAISGSGGRTFYAESVEGRFTISRDNSKNTLFLQMNSLRAEDTAVY |
| | | molecule | YCAKHDYSNYPYFDYWGQGTLVTVSSGGGGSGGGGSGGGGSEIVLTQ |
| | | | SPGTLSLSPGERATLSCRASQSVRSSYLAWYQQKPGQAPRLLIYGAS |
| | | | SRATGIPDRFSGSGSGTDFTLTISRLEPEDFAVYYCQQYGSSPFTFG |
| | | | PGTKLEIKSGGGGSEVQLVESGGGLVQPGGSLKLSCAASGFTFNKYA |
| | | | MNWVRQAPGKGLEWVARIRSKYNNYATYYADSVKDRFTISRDDSKNT |
| | | | AYLQMNNLKTEDTAVYYCVRHGNFGNSYISYWAYWGQGTLVTVSSGG |
| | | | GGSGGGGSGGGGSQTVVTQEPSLTVSPGGTVTLTCGSSTGAVTSGNY |
| | | | PNWVQQKPGQAPRGLIGGTKFLAPGTPARFSGSLLGGKAALTLSGVQ |
| | | | PEDEAEYYCVLWYSNRWVFGGGTKLTVLGGGGDKTHTCPPCPAPELL |
| | | | GGPSVFLFPPKPKDTLMISRTPEVTCVVVDVSHEDPEVKFNWYVDGV |
| | | | EVHNAKTKPCEEQYGSTYRCVSVLTVLHQDWLNGKEYKCKVSNKALP |
| | | | APIEKTISKAKGQPREPQVYTLPPSREEMTKNQVSLTCLVKGFYPSD |
| | | | IAVEWESNGQPENNYKTTPPVLDSDGSFFLYSKLTVDKSRWQQGNVF |
| | | | SCSVMHEALHNHYTQKSLSLSPGKGGGGSGGGGSGGGGSGGGGSGGG |
| | | | GSGGGGSDKTHTCPPCPAPELLGGPSVFLFPPKPKDTLMISRTPEVT |
| | | | CVVVDVSHEDPEVKFNWYVDGVEVHNAKTKPCEEQYGSTYRCVSVLT |
| | | | VLHQDWLNGKEYKCKVSNKALPAPIEKTISKAKGQPREPQVYTLPPS |
| | | | REEMTKNQVSLTCLVKGFYPSDIAVEWESNGQPENNYKTTPPVLDSD |
| | | | GSFFLYSKLTVDKSRWQQGNVFSCSVMHEALHNHYTQKSLSLSPGK |
| 632. | CD70_4_CCx | VH CDR1 | SYAMS |
| | CD3-scFc | | |
| 633. | CD70_4_CCx | VH CDR2 | AISGSGGRTFYAESVEG |
| | CD3-scFc | | |
| 634. | CD70_4_CCx | VH CDR3 | HDYSNYPYFDY |
| | CD3-scFc | | |
| 635. | CD70_4_CCx | VL CDR1 | RASQSIRSSYLA |
| | CD3-scFc | | |
| 636. | CD70_4_CCx | VL CDR2 | GASSRAT |
| | CD3-scFc | | |
| 637. | CD70_4_CCx | VL CDR3 | QQYGDLPFT |
| | CD3-scFc | | |
| 638. | CD70_4_CCx | VH | EVQLLESGGGMVQPGGSLRLSCAASGFTFSSYAMSWVRQAPGKCLEW |
| | CD3-scFc | | VSAISGSGGRTFYAESVEGRFTISRDNSKNTLYLQMNSLRAEDTAVY |
| | | | YCAKHDYSNYPYFDYWGQGTLVTVSS |
| 639. | CD70_4_CCx | VL | EIVLTQSPGTLSLSPGERATLSCRASQSIRSSYLAWYQQKPGQAPRL |
| | CD3-scFc | | LIYGASSRATGIPDRFSGSGSGTDFTLTISRLEPEDFAVYYCQQYGD |
| | | | LPFTFGCGTKLEIK |
| 640. | CD70_4_CCx | scFv | EVQLLESGGGMVQPGGSLRLSCAASGFTFSSYAMSWVRQAPGKCLEW |
| | CD3-scFc | | VSAISGSGGRTFYAESVEGRFTISRDNSKNTLYLQMNSLRAEDTAVY |
| | | | YCAKHDYSNYPYFDYWGQGTLVTVSSGGGGSGGGGSGGGGSEIVLTQ |
| | | | SPGTLSLSPGERATLSCRASQSIRSSYLAWYQQKPGQAPRLLIYGAS |
| | | | SRATGIPDRFSGSGSGTDFTLTISRLEPEDFAVYYCQQYGDLPFTFG |
| | | | CGTKLEIK |
| 641. | CD70_4_CCx | bispecific | EVQLLESGGGMVQPGGSLRLSCAASGFTFSSYAMSWVRQAPGKCLEW |
| | CD3-scFc | molecule | VSAISGSGGRTFYAESVEGRFTISRDNSKNTLYLQMNSLRAEDTAVY |
| | | | YCAKHDYSNYPYFDYWGQGTLVTVSSGGGGSGGGGSGGGGSEIVLTQ |
| | | | SPGTLSLSPGERATLSCRASQSIRSSYLAWYQQKPGQAPRLLIYGAS |
| | | | SRATGIPDRFSGSGSGTDFTLTISRLEPEDFAVYYCQQYGDLPFTFG |
| | | | CGTKLEIKSGGGGSEVQLVESGGGLVQPGGSLKLSCAASGFTFNKYA |
| | | | MNWVRQAPGKGLEWVARIRSKYNNYATYYADSVKDRFTISRDDSKNT |
| | | | AYLQMNNLKTEDTAVYYCVRHGNFGNSYISYWAYWGQGTLVTVSSGG |
| | | | GGSGGGGSGGGGSQTVVTQEPSLTVSPGGTVTLTCGSSTGAVTSGNY |
| | | | PNWVQQKPGQAPRGLIGGTKFLAPGTPARFSGSLLGGKAALTLSGVQ |
| | | | PEDEAEYYCVLWYSNRWVFGGGTKLTVL |
| 642. | CD70_4_CCx | bispecific | EVQLLESGGGMVQPGGSLRLSCAASGFTFSSYAMSWVRQAPGKCLEW |
| | CD3-scFc | HLE | VSAISGSGGRTFYAESVEGRFTISRDNSKNTLYLQMNSLRAEDTAVY |
| | | molecule | YCAKHDYSNYPYFDYWGQGTLVTVSSGGGGSGGGGSGGGGSEIVLTQ |
| | | | SPGTLSLSPGERATLSCRASQSIRSSYLAWYQQKPGQAPRLLIYGAS |
| | | | SRATGIPDRFSGSGSGTDFTLTISRLEPEDFAVYYCQQYGDLPFTFG |
| | | | CGTKLEIKSGGGGSEVQLVESGGGLVQPGGSLKLSCAASGFTFNKYA |
| | | | MNWVRQAPGKGLEWVARIRSKYNNYATYYADSVKDRFTISRDDSKNT |
| | | | AYLQMNNLKTEDTAVYYCVRHGNFGNSYISYWAYWGQGTLVTVSSGG |
| | | | GGSGGGGSGGGGSQTVVTQEPSLTVSPGGTVTLTCGSSTGAVTSGNY |
| | | | PNWVQQKPGQAPRGLIGGTKFLAPGTPARFSGSLLGGKAALTLSGVQ |
| | | | PEDEAEYYCVLWYSNRWVFGGGTKLTVLGGGGDKTHTCPPCPAPELL |
| | | | GGPSVFLFPPKPKDTLMISRTPEVTCVVVDVSHEDPEVKFNWYVDGV |
| | | | EVHNAKTKPCEEQYGSTYRCVSVLTVLHQDWLNGKEYKCKVSNKALP |
| | | | APIEKTISKAKGQPREPQVYTLPPSREEMTKNQVSLTCLVKGFYPSD |
| | | | IAVEWESNGQPENNYKTTPPVLDSDGSFFLYSKLTVDKSRWQQGNVF |
| | | | SCSVMHEALHNHYTQKSLSLSPGKGGGGSGGGGSGGGGSGGGGSGGG |
| | | | GSGGGGSDKTHTCPPCPAPELLGGPSVFLFPPKPKDTLMISRTPEVT |
| | | | CVVVDVSHEDPEVKFNWYVDGVEVHNAKTKPCEEQYGSTYRCVSVLT |
| | | | VLHQDWLNGKEYKCKVSNKALPAPIEKTISKAKGQPREPQVYTLPPS |
| | | | REEMTKNQVSLTCLVKGFYPSDIAVEWESNGQPENNYKTTPPVLDSD |
| | | | GSFFLYSKLTVDKSRWQQGNVFSCSVMHEALHNHYTQKSLSLSPGK |
| 643. | CD70_4xCD3- | VH | EVQLLESGGGMVQPGGSLRLSCAASGFTFSSYAMSWVRQAPGKGLEW |
| | scFc | | VSAISGSGGRTFYAESVEGRFTISRDNSKNTLYLQMNSLRAEDTAVY |
| | | | YCAKHDYSNYPYFDYWGQGTLVTVSS |
| 644. | CD70_4xCD3- | VL | EIVLTQSPGTLSLSPGERATLSCRASQSIRSSYLAWYQQKPGQAPRL |
| | scFc | | LIYGASSRATGIPDRFSGSGSGTDFTLTISRLEPEDFAVYYCQQYGD |
| | | | LPFTFGPGTKLEIK |
| 645. | CD70_4xCD3- | scFv | EVQLLESGGGMVQPGGSLRLSCAASGFTFSSYAMSWVRQAPGKGLEW |
| | scFc | | VSAISGSGGRTFYAESVEGRFTISRDNSKNTLYLQMNSLRAEDTAVY |
| | | | YCAKHDYSNYPYFDYWGQGTLVTVSSGGGGSGGGGSGGGGSEIVLTQ |
| | | | SPGTLSLSPGERATLSCRASQSIRSSYLAWYQQKPGQAPRLLIYGAS |
| | | | SRATGIPDRFSGSGSGTDFTLTISRLEPEDFAVYYCQQYGDLPFTFG |
| | | | PGTKLEIK |
| 646. | CD70_4xCD3- | bispecific | EVQLLESGGGMVQPGGSLRLSCAASGFTFSSYAMSWVRQAPGKGLEW |
| | scFc | molecule | VSAISGSGGRTFYAESVEGRFTISRDNSKNTLYLQMNSLRAEDTAVY |
| | | | YCAKHDYSNYPYFDYWGQGTLVTVSSGGGGSGGGGSGGGGSEIVLTQ |
| | | | SPGTLSLSPGERATLSCRASQSIRSSYLAWYQQKPGQAPRLLIYGAS |
| | | | SRATGIPDRFSGSGSGTDFTLTISRLEPEDFAVYYCQQYGDLPFTFG |
| | | | PGTKLEIKSGGGGSEVQLVESGGGLVQPGGSLKLSCAASGFTFNKYA |
| | | | MNWVRQAPGKGLEWVARIRSKYNNYATYYADSVKDRFTISRDDSKNT |
| | | | AYLQMNNLKTEDTAVYYCVRHGNFGNSYISYWAYWGQGTLVTVSSGG |
| | | | GGSGGGGSGGGGSQTVVTQEPSLTVSPGGTVTLTCGSSTGAVTSGNY |
| | | | PNWVQQKPGQAPRGLIGGTKFLAPGTPARFSGSLLGGKAALTLSGVQ |
| | | | PEDEAEYYCVLWYSNRWVFGGGTKLTVL |
| 647. | CD70_4xCD3- | bispecific | EVQLLESGGGMVQPGGSLRLSCAASGFTFSSYAMSWVRQAPGKGLEW |
| | scFc | HLE | VSAISGSGGRTFYAESVEGRFTISRDNSKNTLYLQMNSLRAEDTAVY |
| | | molecule | YCAKHDYSNYPYFDYWGQGTLVTVSSGGGGSGGGGSGGGGSEIVLTQ |
| | | | SPGTLSLSPGERATLSCRASQSIRSSYLAWYQQKPGQAPRLLIYGAS |
| | | | SRATGIPDRFSGSGSGTDFTLTISRLEPEDFAVYYCQQYGDLPFTFG |
| | | | PGTKLEIKSGGGGSEVQLVESGGGLVQPGGSLKLSCAASGFTFNKYA |
| | | | MNWVRQAPGKGLEWVARIRSKYNNYATYYADSVKDRFTISRDDSKNT |
| | | | AYLQMNNLKTEDTAVYYCVRHGNFGNSYISYWAYWGQGTLVTVSSGG |
| | | | GGSGGGGSGGGGSQTVVTQEPSLTVSPGGTVTLTCGSSTGAVTSGNY |
| | | | PNWVQQKPGQAPRGLIGGTKFLAPGTPARFSGSLLGGKAALTLSGVQ |
| | | | PEDEAEYYCVLWYSNRWVFGGGTKLTVLGGGGDKTHTCPPCPAPELL |
| | | | GGPSVFLFPPKPKDTLMISRTPEVTCVVVDVSHEDPEVKFNWYVDGV |
| | | | EVHNAKTKPCEEQYGSTYRCVSVLTVLHQDWLNGKEYKCKVSNKALP |
| | | | APIEKTISKAKGQPREPQVYTLPPSREEMTKNQVSLTCLVKGFYPSD |
| | | | IAVEWESNGQPENNYKTTPPVLDSDGSFFLYSKLTVDKSRWQQGNVF |
| | | | SCSVMHEALHNHYTQKSLSLSPGKGGGGSGGGGSGGGGSGGGGSGGG |
| | | | GSGGGGSDKTHTCPPCPAPELLGGPSVFLFPPKPKDTLMISRTPEVT |
| | | | CVVVDVSHEDPEVKFNWYVDGVEVHNAKTKPCEEQYGSTYRCVSVLT |
| | | | VLHQDWLNGKEYKCKVSNKALPAPIEKTISKAKGQPREPQVYTLPPS |
| | | | REEMTKNQVSLTCLVKGFYPSDIAVEWESNGQPENNYKTTPPVLDSD |
| | | | GSFFLYSKLTVDKSRWQQGNVFSCSVMHEALHNHYTQKSLSLSPGK |
| 648. | CD70_5_CCx | VH CDR1 | SYAMS |
| | CD3-scFc | | |
| 649. | CD70_5_CCx | VH CDR2 | AISGSGGRTHYAESVKG |
| | CD3-scFc | | |
| 650. | CD70_5_CCx | VH CDR3 | HDYSNYPYFDY |
| | CD3-scFc | | |
| 651. | CD70_5_CCx | VL CDR1 | RASQSVRSSYLA |
| | CD3-scFc | | |
| 652. | CD70_5_CCx | VL CDR2 | GASSRAT |
| | CD3-scFc | | |
| 653. | CD70_5_CCx | VL CDR3 | QQYGSSPFT |
| | CD3-scFc | | |
| 654. | CD70_5_CCx | VH | EVQLLESGGGLVQSGGSLRLSCAASGFTFSSYAMSWVRQAPGKCLEW |
| | CD3-scFc | | VSAISGSGGRTHYAESVKGRFTISRDNSKNTLYLQMNSLRAEDTAVY |
| | | | YCAKHDYSNYPYFDYWGQGTLVTVSS |
| 655. | CD70_5_CCx | | EIVLTQSPGTLSLSPGERATLSCRASQSVRSSYLAWYQQKPGQAPRL |
| | CD3-scFc | VL | LIYGASSRATGIPDRFSGSGSGTDFTLTISRLEPEDFAVYYCQQYGS |
| | | | SPFTFGCGTKLEIK |
| 656. | CD70_5_CCx | scFv | EVQLLESGGGLVQSGGSLRLSCAASGFTFSSYAMSWVRQAPGKCLEW |
| | CD3-scFc | | VSAISGSGGRTHYAESVKGRFTISRDNSKNTLYLQMNSLRAEDTAVY |
| | | | YCAKHDYSNYPYFDYWGQGTLVTVSSGGGGSGGGGSGGGGSEIVLTQ |
| | | | SPGTLSLSPGERATLSCRASQSVRSSYLAWYQQKPGQAPRLLIYGAS |
| | | | SRATGIPDRFSGSGSGTDFTLTISRLEPEDFAVYYCQQYGSSPFTFG |
| | | | CGTKLEIK |
| 657. | CD70_5_CCx | bispecific | EVQLLESGGGLVQSGGSLRLSCAASGFTFSSYAMSWVRQAPGKCLEW |
| | CD3-scFc | molecule | VSAISGSGGRTHYAESVKGRFTISRDNSKNTLYLQMNSLRAEDTAVY |
| | | | YCAKHDYSNYPYFDYWGQGTLVTVSSGGGGSGGGGSGGGGSEIVLTQ |
| | | | SPGTLSLSPGERATLSCRASQSVRSSYLAWYQQKPGQAPRLLIYGAS |
| | | | SRATGIPDRFSGSGSGTDFTLTISRLEPEDFAVYYCQQYGSSPFTFG |
| | | | CGTKLEIKSGGGGSEVQLVESGGGLVQPGGSLKLSCAASGFTFNKYA |
| | | | MNWVRQAPGKGLEWVARIRSKYNNYATYYADSVKDRFTISRDDSKNT |
| | | | AYLQMNNLKTEDTAVYYCVRHGNFGNSYISYWAYWGQGTLVTVSSGG |
| | | | GGSGGGGSGGGGSQTVVTQEPSLTVSPGGTVTLTCGSSTGAVTSGNY |
| | | | PNWVQQKPGQAPRGLIGGTKFLAPGTPARFSGSLLGGKAALTLSGVQ |
| | | | PEDEAEYYCVLWYSNRWVFGGGTKLTVL |
| 658. | CD70_5_CCx | bispecific | EVQLLESGGGLVQSGGSLRLSCAASGFTFSSYAMSWVRQAPGKCLEW |
| | CD3-scFc | HLE | VSAISGSGGRTHYAESVKGRFTISRDNSKNTLYLQMNSLRAEDTAVY |
| | | molecule | YCAKHDYSNYPYFDYWGQGTLVTVSSGGGGSGGGGSGGGGSEIVLTQ |
| | | | SPGTLSLSPGERATLSCRASQSVRSSYLAWYQQKPGQAPRLLIYGAS |
| | | | SRATGIPDRFSGSGSGTDFTLTISRLEPEDFAVYYCQQYGSSPFTFG |
| | | | CGTKLEIKSGGGGSEVQLVESGGGLVQPGGSLKLSCAASGFTFNKYA |
| | | | MNWVRQAPGKGLEWVARIRSKYNNYATYYADSVKDRFTISRDDSKNT |
| | | | AYLQMNNLKTEDTAVYYCVRHGNFGNSYISYWAYWGQGTLVTVSSGG |
| | | | GGSGGGGSGGGGSQTVVTQEPSLTVSPGGTVTLTCGSSTGAVTSGNY |
| | | | PNWVQQKPGQAPRGLIGGTKFLAPGTPARFSGSLLGGKAALTLSGVQ |
| | | | PEDEAEYYCVLWYSNRWVFGGGTKLTVLGGGGDKTHTCPPCPAPELL |
| | | | GGPSVFLFPPKPKDTLMISRTPEVTCVVVDVSHEDPEVKFNWYVDGV |
| | | | EVHNAKTKPCEEQYGSTYRCVSVLTVLHQDWLNGKEYKCKVSNKALP |
| | | | APIEKTISKAKGQPREPQVYTLPPSREEMTKNQVSLTCLVKGFYPSD |
| | | | IAVEWESNGQPENNYKTTPPVLDSDGSFFLYSKLTVDKSRWQQGNVF |
| | | | SCSVMHEALHNHYTQKSLSLSPGKGGGGSGGGGSGGGGSGGGGSGGG |
| | | | GSGGGGSDKTHTCPPCPAPELLGGPSVFLFPPKPKDTLMISRTPEVT |
| | | | CVVVDVSHEDPEVKFNWYVDGVEVHNAKTKPCEEQYGSTYRCVSVLT |
| | | | VLHQDWLNGKEYKCKVSNKALPAPIEKTISKAKGQPREPQVYTLPPS |
| | | | REEMTKNQVSLTCLVKGFYPSDIAVEWESNGQPENNYKTTPPVLDSD |
| | | | GSFFLYSKLTVDKSRWQQGNVFSCSVMHEALHNHYTQKSLSLSPGK |
| 659. | CD70_5xCD3- | VH | EVQLLESGGGLVQSGGSLRLSCAASGFTFSSYAMSWVRQAPGKGLEW |
| | scFc | | VSAISGSGGRTHYAESVKGRFTISRDNSKNTLYLQMNSLRAEDTAVY |
| | | | YCAKHDYSNYPYFDYWGQGTLVTVSS |
| 660. | CD70_5xCD3- | VL | EIVLTQSPGTLSLSPGERATLSCRASQSVRSSYLAWYQQKPGQAPRL |
| | scFc | | LIYGASSRATGIPDRFSGSGSGTDFTLTISRLEPEDFAVYYCQQYGS |
| | | | SPFTFGPGTKLEIK |
| 661. | CD70_5xCD3- | scFv | EVQLLESGGGLVQSGGSLRLSCAASGFTFSSYAMSWVRQAPGKGLEW |
| | scFc | | VSAISGSGGRTHYAESVKGRFTISRDNSKNTLYLQMNSLRAEDTAVY |
| | | | YCAKHDYSNYPYFDYWGQGTLVTVSSGGGGSGGGGSGGGGSEIVLTQ |
| | | | SPGTLSLSPGERATLSCRASQSVRSSYLAWYQQKPGQAPRLLIYGAS |
| | | | SRATGIPDRFSGSGSGTDFTLTISRLEPEDFAVYYCQQYGSSPFTFG |
| | | | PGTKLEIK |
| 662. | CD70_5xCD3- | bispecific | EVQLLESGGGLVQSGGSLRLSCAASGFTFSSYAMSWVRQAPGKGLEW |
| | scFc | molecule | VSAISGSGGRTHYAESVKGRFTISRDNSKNTLYLQMNSLRAEDTAVY |
| | | | YCAKHDYSNYPYFDYWGQGTLVTVSSGGGGSGGGGSGGGGSEIVLTQ |
| | | | SPGTLSLSPGERATLSCRASQSVRSSYLAWYQQKPGQAPRLLIYGAS |
| | | | SRATGIPDRFSGSGSGTDFTLTISRLEPEDFAVYYCQQYGSSPFTFG |
| | | | PGTKLEIKSGGGGSEVQLVESGGGLVQPGGSLKLSCAASGFTFNKYA |
| | | | MNWVRQAPGKGLEWVARIRSKYNNYATYYADSVKDRFTISRDDSKNT |
| | | | AYLQMNNLKTEDTAVYYCVRHGNFGNSYISYWAYWGQGTLVTVSSGG |
| | | | GGSGGGGSGGGGSQTVVTQEPSLTVSPGGTVTLTCGSSTGAVTSGNY |
| | | | PNWVQQKPGQAPRGLIGGTKFLAPGTPARFSGSLLGGKAALTLSGVQ |
| | | | PEDEAEYYCVLWYSNRWVFGGGTKLTVL |
| 663. | CD70_5xCD3- | bispecific | EVQLLESGGGLVQSGGSLRLSCAASGFTFSSYAMSWVRQAPGKGLEW |
| | scFc | HLE | VSAISGSGGRTHYAESVKGRFTISRDNSKNTLYLQMNSLRAEDTAVY |
| | | molecule | YCAKHDYSNYPYFDYWGQGTLVTVSSGGGGSGGGGSGGGGSEIVLTQ |
| | | | SPGTLSLSPGERATLSCRASQSVRSSYLAWYQQKPGQAPRLLIYGAS |
| | | | SRATGIPDRFSGSGSGTDFTLTISRLEPEDFAVYYCQQYGSSPFTFG |
| | | | PGTKLEIKSGGGGSEVQLVESGGGLVQPGGSLKLSCAASGFTFNKYA |
| | | | MNWVRQAPGKGLEWVARIRSKYNNYATYYADSVKDRFTISRDDSKNT |
| | | | AYLQMNNLKTEDTAVYYCVRHGNFGNSYISYWAYWGQGTLVTVSSGG |
| | | | GGSGGGGSGGGGSQTVVTQEPSLTVSPGGTVTLTCGSSTGAVTSGNY |
| | | | PNWVQQKPGQAPRGLIGGTKFLAPGTPARFSGSLLGGKAALTLSGVQ |
| | | | PEDEAEYYCVLWYSNRWVFGGGTKLTVLGGGGDKTHTCPPCPAPELL |
| | | | GGPSVFLFPPKPKDTLMISRTPEVTCVVVDVSHEDPEVKFNWYVDGV |
| | | | EVHNAKTKPCEEQYGSTYRCVSVLTVLHQDWLNGKEYKCKVSNKALP |
| | | | APIEKTISKAKGQPREPQVYTLPPSREEMTKNQVSLTCLVKGFYPSD |
| | | | IAVEWESNGQPENNYKTTPPVLDSDGSFFLYSKLTVDKSRWQQGNVF |
| | | | SCSVMHEALHNHYTQKSLSLSPGKGGGGSGGGGSGGGGSGGGGSGGG |
| | | | GSGGGGSDKTHTCPPCPAPELLGGPSVFLFPPKPKDTLMISRTPEVT |
| | | | CVVVDVSHEDPEVKFNWYVDGVEVHNAKTKPCEEQYGSTYRCVSVLT |
| | | | VLHQDWLNGKEYKCKVSNKALPAPIEKTISKAKGQPREPQVYTLPPS |
| | | | REEMTKNQVSLTCLVKGFYPSDIAVEWESNGQPENNYKTTPPVLDSD |
| | | | GSFFLYSKLTVDKSRWQQGNVFSCSVMHEALHNHYTQKSLSLSPGK |
| 664. | CD70_6_CCx | VH CDR1 | SYAMS |
| | CD3-scFc | | |
| 665. | CD70_6_CCx | VH CDR2 | LISGSGGRTHYAESVKG |
| | CD3-scFc | | |
| 666. | CD70_6_CCx | VH CDR3 | HDYSNYPYFDY |
| | CD3-scFc | | |
| 667. | CD70_6_CCx | VL CDR1 | RASQSVRSTYLA |
| | CD3-scFc | | |
| 668. | CD70_6_CCx | VL CDR2 | DASSRAT |
| | CD3-scFc | | |
| 669. | CD70_6_CCx | VL CDR3 | QQYGSSPPT |
| | CD3-scFc | | |
| 670. | CD70_6_CCx | VH | EVQLLESGGGLVQPGGSLRLSCAASGFTFSSYAMSWVRQAPGKCLEW |
| | CD3-scFc | | VSLISGSGGRTHYAESVKGRFTISRDNSKNTLYLQMNSLRAEDTAVY |
| | | | YCAKHDYSNYPYFDYWGQGTLVTVSS |
| 671. | CD70_6_CCx | VL | EIVLTQSPGTLSLSPGERATLSCRASQSVRSTYLAWYQQKPGQAPRL |
| | CD3-scFc | | LIYDASSRATGIPDRFSGSGSGTDFTLTISRLEPEDFAVYFCQQYGS |
| | | | SPPTFGCGTKLEIK |
| 672. | CD70_6_CCx | scFv | EVQLLESGGGLVQPGGSLRLSCAASGFTFSSYAMSWVRQAPGKCLEW |
| | CD3-scFc | | VSLISGSGGRTHYAESVKGRFTISRDNSKNTLYLQMNSLRAEDTAVY |
| | | | YCAKHDYSNYPYFDYWGQGTLVTVSSGGGGSGGGGSGGGGSEIVLTQ |
| | | | SPGTLSLSPGERATLSCRASQSVRSTYLAWYQQKPGQAPRLLIYDAS |
| | | | SRATGIPDRFSGSGSGTDFTLTISRLEPEDFAVYFCQQYGSSPPTFG |
| | | | CGTKLEIK |
| 673. | CD70_6_CCx | bispecific | EVQLLESGGGLVQPGGSLRLSCAASGFTFSSYAMSWVRQAPGKCLEW |
| | CD3-scFc | molecule | VSLISGSGGRTHYAESVKGRFTISRDNSKNTLYLQMNSLRAEDTAVY |
| | | | YCAKHDYSNYPYFDYWGQGTLVTVSSGGGGSGGGGSGGGGSEIVLTQ |
| | | | SPGTLSLSPGERATLSCRASQSVRSTYLAWYQQKPGQAPRLLIYDAS |
| | | | SRATGIPDRFSGSGSGTDFTLTISRLEPEDFAVYFCQQYGSSPPTFG |
| | | | CGTKLEIKSGGGGSEVQLVESGGGLVQPGGSLKLSCAASGFTFNKYA |
| | | | MNWVRQAPGKGLEWVARIRSKYNNYATYYADSVKDRFTISRDDSKNT |
| | | | AYLQMNNLKTEDTAVYYCVRHGNFGNSYISYWAYWGQGTLVTVSSGG |
| | | | GGSGGGGSGGGGSQTVVTQEPSLTVSPGGTVTLTCGSSTGAVTSGNY |
| | | | PNWVQQKPGQAPRGLIGGTKFLAPGTPARFSGSLLGGKAALTLSGVQ |
| | | | PEDEAEYYCVLWYSNRWVFGGGTKLTVL |
| 674. | CD70_6_CCx | bispecific | EVQLLESGGGLVQPGGSLRLSCAASGFTFSSYAMSWVRQAPGKCLEW |
| | CD3-scFc | HLE | VSLISGSGGRTHYAESVKGRFTISRDNSKNTLYLQMNSLRAEDTAVY |
| | | molecule | YCAKHDYSNYPYFDYWGQGTLVTVSSGGGGSGGGGSGGGGSEIVLTQ |
| | | | SPGTLSLSPGERATLSCRASQSVRSTYLAWYQQKPGQAPRLLIYDAS |
| | | | SRATGIPDRFSGSGSGTDFTLTISRLEPEDFAVYFCQQYGSSPPTFG |
| | | | CGTKLEIKSGGGGSEVQLVESGGGLVQPGGSLKLSCAASGFTFNKYA |
| | | | MNWVRQAPGKGLEWVARIRSKYNNYATYYADSVKDRFTISRDDSKNT |
| | | | AYLQMNNLKTEDTAVYYCVRHGNFGNSYISYWAYWGQGTLVTVSSGG |
| | | | GGSGGGGSGGGGSQTVVTQEPSLTVSPGGTVTLTCGSSTGAVTSGNY |
| | | | PNWVQQKPGQAPRGLIGGTKFLAPGTPARFSGSLLGGKAALTLSGVQ |
| | | | PEDEAEYYCVLWYSNRWVFGGGTKLTVLGGGGDKTHTCPPCPAPELL |
| | | | GGPSVFLFPPKPKDTLMISRTPEVTCVVVDVSHEDPEVKFNWYVDGV |
| | | | EVHNAKTKPCEEQYGSTYRCVSVLTVLHQDWLNGKEYKCKVSNKALP |
| | | | APIEKTISKAKGQPREPQVYTLPPSREEMTKNQVSLTCLVKGFYPSD |
| | | | IAVEWESNGQPENNYKTTPPVLDSDGSFFLYSKLTVDKSRWQQGNVF |
| | | | SCSVMHEALHNHYTQKSLSLSPGKGGGGSGGGGSGGGGSGGGGSGGG |
| | | | GSGGGGSDKTHTCPPCPAPELLGGPSVFLFPPKPKDTLMISRTPEVT |
| | | | CVVVDVSHEDPEVKFNWYVDGVEVHNAKTKPCEEQYGSTYRCVSVLT |
| | | | VLHQDWLNGKEYKCKVSNKALPAPIEKTISKAKGQPREPQVYTLPPS |
| | | | REEMTKNQVSLTCLVKGFYPSDIAVEWESNGQPENNYKTTPPVLDSD |
| | | | GSFFLYSKLTVDKSRWQQGNVFSCSVMHEALHNHYTQKSLSLSPGK |
| 675. | CD70_6xCD3- | VH | EVQLLESGGGLVQPGGSLRLSCAASGFTFSSYAMSWVRQAPGKGLEW |
| | scFc | | VSLISGSGGRTHYAESVKGRFTISRDNSKNTLYLQMNSLRAEDTAVY |
| | | | YCAKHDYSNYPYFDYWGQGTLVTVSS |
| 676. | CD70_6xCD3- | VL | EIVLTQSPGTLSLSPGERATLSCRASQSVRSTYLAWYQQKPGQAPRL |
| | scFc | | LIYDASSRATGIPDRFSGSGSGTDFTLTISRLEPEDFAVYFCQQYGS |
| | | | SPPTFGGGTKLEIK |
| 677. | CD70_6xCD3- | scFv | EVQLLESGGGLVQPGGSLRLSCAASGFTFSSYAMSWVRQAPGKGLEW |
| | scFc | | VSLISGSGGRTHYAESVKGRFTISRDNSKNTLYLQMNSLRAEDTAVY |
| | | | YCAKHDYSNYPYFDYWGQGTLVTVSSGGGGSGGGGSGGGGSEIVLTQ |
| | | | SPGTLSLSPGERATLSCRASQSVRSTYLAWYQQKPGQAPRLLIYDAS |
| | | | SRATGIPDRFSGSGSGTDFTLTISRLEPEDFAVYFCQQYGSSPPTFG |
| | | | GGTKLEIK |
| 678. | CD70_6xCD3- | bispecific | EVQLLESGGGLVQPGGSLRLSCAASGFTFSSYAMSWVRQAPGKGLEW |
| | scFc | molecule | VSLISGSGGRTHYAESVKGRFTISRDNSKNTLYLQMNSLRAEDTAVY |
| | | | YCAKHDYSNYPYFDYWGQGTLVTVSSGGGGSGGGGSGGGGSEIVLTQ |
| | | | SPGTLSLSPGERATLSCRASQSVRSTYLAWYQQKPGQAPRLLIYDAS |
| | | | SRATGIPDRFSGSGSGTDFTLTISRLEPEDFAVYFCQQYGSSPPTFG |
| | | | GGTKLEIKSGGGGSEVQLVESGGGLVQPGGSLKLSCAASGFTFNKYA |
| | | | MNWVRQAPGKGLEWVARIRSKYNNYATYYADSVKDRFTISRDDSKNT |
| | | | AYLQMNNLKTEDTAVYYCVRHGNFGNSYISYWAYWGQGTLVTVSSGG |
| | | | GGSGGGGSGGGGSQTVVTQEPSLTVSPGGTVTLTCGSSTGAVTSGNY |
| | | | PNWVQQKPGQAPRGLIGGTKFLAPGTPARFSGSLLGGKAALTLSGVQ |
| | | | PEDEAEYYCVLWYSNRWVFGGGTKLTVL |
| 679. | CD70_6xCD3- | bispecific | EVQLLESGGGLVQPGGSLRLSCAASGFTFSSYAMSWVRQAPGKGLEW |
| | scFc | HLE | VSLISGSGGRTHYAESVKGRFTISRDNSKNTLYLQMNSLRAEDTAVY |
| | | molecule | YCAKHDYSNYPYFDYWGQGTLVTVSSGGGGSGGGGSGGGGSEIVLTQ |
| | | | SPGTLSLSPGERATLSCRASQSVRSTYLAWYQQKPGQAPRLLIYDAS |
| | | | SRATGIPDRFSGSGSGTDFTLTISRLEPEDFAVYFCQQYGSSPPTFG |
| | | | GGTKLEIKSGGGGSEVQLVESGGGLVQPGGSLKLSCAASGFTENKYA |
| | | | MNWVRQAPGKGLEWVARIRSKYNNYATYYADSVKDRFTISRDDSKNT |
| | | | AYLQMNNLKTEDTAVYYCVRHGNFGNSYISYWAYWGQGTLVTVSSGG |
| | | | GGSGGGGSGGGGSQTVVTQEPSLTVSPGGTVTLTCGSSTGAVTSGNY |
| | | | PNWVQQKPGQAPRGLIGGTKFLAPGTPARFSGSLLGGKAALTLSGVQ |
| | | | PEDEAEYYCVLWYSNRWVFGGGTKLTVLGGGGDKTHTCPPCPAPELL |
| | | | GGPSVFLEPPKPKDTLMISRTPEVTCVVVDVSHEDPEVKFNWYVDGV |
| | | | EVHNAKTKPCEEQYGSTYRCVSVLTVLHQDWLNGKEYKCKVSNKALP |
| | | | APIEKTISKAKGQPREPQVYTLPPSREEMTKNQVSLTCLVKGFYPSD |
| | | | IAVEWESNGQPENNYKTTPPVLDSDGSFELYSKLTVDKSRWQQGNVF |
| | | | SCSVMHEALHNHYTQKSLSLSPGKGGGGSGGGGSGGGGSGGGGSGGG |
| | | | GSGGGGSDKTHTCPPCPAPELLGGPSVFLEPPKPKDTLMISRTPEVT |
| | | | CVVVDVSHEDPEVKFNWYVDGVEVHNAKTKPCEEQYGSTYRCVSVLT |
| | | | VLHQDWLNGKEYKCKVSNKALPAPIEKTISKAKGQPREPQVYTLPPS |
| | | | REEMTKNQVSLTCLVKGFYPSDIAVEWESNGQPENNYKTTPPVLDSD |
| | | | GSFELYSKLTVDKSRWQQGNVESCSVMHEALHNHYTQKSLSLSPGK |
| 680. | CD70_7_CCx | VH CDR1 | TYAMS |
| | CD3-scFc | | |
| 681. | CD70_7_CCx | VH CDR2 | AISGSGGSTFYAESVKG |
| | CD3-scFc | | |
| 682. | CD70_7_CCx | VH CDR3 | HDYSNYPYFDY |
| | CD3-scFc | | |
| 683. | CD70_7_CCx | VL CDR1 | RASQSVRSSYLA |
| | CD3-scFc | | |
| 684. | CD70_7_CCx | VL CDR2 | GASSRAT |
| | CD3-scFc | | |
| 685. | CD70_7_CCx | VL CDR3 | QQYGDLPFT |
| | CD3-scFc | | |
| 686. | CD70_7_CCx | VH | EVQLLESGGGLVQPGGSLRLSCAASGFTFSTYAMSWVRQAPGKCLEW |
| | CD3-scFc | | VSAISGSGGSTFYAESVKGRFTISRDNSKNTLSLQMNSLRAEDTAVY |
| | | | YCAKHDYSNYPYFDYWGQGTLVTVSS |
| 687. | CD70_7_CCx | VL | EIVLTQSPGTLSLSPGERATLSCRASQSVRSSYLAWYQQKPGQAPRL |
| | CD3-scFc | | LIYGASSRATGIPDRFSGSGSGTDFTLTISRLEPEDFAVYYCQQYGD |
| | | | LPFTFGCGTKLEIK |
| 688. | CD70_7_CCx | scFv | EVQLLESGGGLVQPGGSLRLSCAASGFTFSTYAMSWVRQAPGKCLEW |
| | CD3-scFc | | VSAISGSGGSTFYAESVKGRFTISRDNSKNTLSLQMNSLRAEDTAVY |
| | | | YCAKHDYSNYPYFDYWGQGTLVTVSSGGGGSGGGGSGGGGSEIVLTQ |
| | | | SPGTLSLSPGERATLSCRASQSVRSSYLAWYQQKPGQAPRLLIYGAS |
| | | | SRATGIPDRFSGSGSGTDFTLTISRLEPEDFAVYYCQQYGDLPFTFG |
| | | | CGTKLEIK |
| 689. | CD70_7_CCx | bispecific | EVQLLESGGGLVQPGGSLRLSCAASGFTFSTYAMSWVRQAPGKCLEW |
| | CD3-scFc | molecule | VSAISGSGGSTFYAESVKGRFTISRDNSKNTLSLQMNSLRAEDTAVY |
| | | | YCAKHDYSNYPYFDYWGQGTLVTVSSGGGGSGGGGSGGGGSEIVLTQ |
| | | | SPGTLSLSPGERATLSCRASQSVRSSYLAWYQQKPGQAPRLLIYGAS |
| | | | SRATGIPDRFSGSGSGTDFTLTISRLEPEDFAVYYCQQYGDLPFTFG |
| | | | CGTKLEIKSGGGGSEVQLVESGGGLVQPGGSLKLSCAASGFTENKYA |
| | | | MNWVRQAPGKGLEWVARIRSKYNNYATYYADSVKDRFTISRDDSKNT |
| | | | AYLQMNNLKTEDTAVYYCVRHGNFGNSYISYWAYWGQGTLVTVSSGG |
| | | | GGSGGGGSGGGGSQTVVTQEPSLTVSPGGTVTLTCGSSTGAVTSGNY |
| | | | PNWVQQKPGQAPRGLIGGTKFLAPGTPARFSGSLLGGKAALTLSGVQ |
| | | | PEDEAEYYCVLWYSNRWVFGGGTKLTVL |
| 690. | CD70_7_CCx | bispecific | EVQLLESGGGLVQPGGSLRLSCAASGFTFSTYAMSWVRQAPGKCLEW |
| | CD3-scFc | HLE | VSAISGSGGSTFYAESVKGRFTISRDNSKNTLSLQMNSLRAEDTAVY |
| | | molecule | YCAKHDYSNYPYFDYWGQGTLVTVSSGGGGSGGGGSGGGGSEIVLTQ |
| | | | SPGTLSLSPGERATLSCRASQSVRSSYLAWYQQKPGQAPRLLIYGAS |
| | | | SRATGIPDRFSGSGSGTDFTLTISRLEPEDFAVYYCQQYGDLPFTFG |
| | | | CGTKLEIKSGGGGSEVQLVESGGGLVQPGGSLKLSCAASGFTENKYA |
| | | | MNWVRQAPGKGLEWVARIRSKYNNYATYYADSVKDRFTISRDDSKNT |
| | | | AYLQMNNLKTEDTAVYYCVRHGNFGNSYISYWAYWGQGTLVTVSSGG |
| | | | GGSGGGGSGGGGSQTVVTQEPSLTVSPGGTVTLTCGSSTGAVTSGNY |
| | | | PNWVQQKPGQAPRGLIGGTKFLAPGTPARFSGSLLGGKAALTLSGVQ |
| | | | PEDEAEYYCVLWYSNRWVFGGGTKLTVLGGGGDKTHTCPPCPAPELL |
| | | | GGPSVFLFPPKPKDTLMISRTPEVTCVVVDVSHEDPEVKFNWYVDGV |
| | | | EVHNAKTKPCEEQYGSTYRCVSVLTVLHQDWLNGKEYKCKVSNKALP |
| | | | APIEKTISKAKGQPREPQVYTLPPSREEMTKNQVSLTCLVKGFYPSD |
| | | | IAVEWESNGQPENNYKTTPPVLDSDGSFFLYSKLTVDKSRWQQGNVF |
| | | | SCSVMHEALHNHYTQKSLSLSPGKGGGGSGGGGSGGGGSGGGGSGGG |
| | | | GSGGGGSDKTHTCPPCPAPELLGGPSVFLFPPKPKDTLMISRTPEVT |
| | | | CVVVDVSHEDPEVKFNWYVDGVEVHNAKTKPCEEQYGSTYRCVSVLT |
| | | | VLHQDWLNGKEYKCKVSNKALPAPIEKTISKAKGQPREPQVYTLPPS |
| | | | REEMTKNQVSLTCLVKGFYPSDIAVEWESNGQPENNYKTTPPVLDSD |
| | | | GSFFLYSKLTVDKSRWQQGNVFSCSVMHEALHNHYTQKSLSLSPGK |
| 691. | CD70_7xCD3- | VH | EVQLLESGGGLVQPGGSLRLSCAASGFTFSTYAMSWVRQAPGKGLEW |
| | scFc | | VSAISGSGGSTFYAESVKGRFTISRDNSKNTLSLQMNSLRAEDTAVY |
| | | | YCAKHDYSNYPYFDYWGQGTLVTVSS |
| 692. | CD70_7xCD3- | VL | EIVLTQSPGTLSLSPGERATLSCRASQSVRSSYLAWYQQKPGQAPRL |
| | scFc | | LIYGASSRATGIPDRFSGSGSGTDFTLTISRLEPEDFAVYYCQQYGD |
| | | | LPFTFGPGTKLEIK |
| 693. | CD70_7xCD3- | scFv | EVQLLESGGGLVQPGGSLRLSCAASGFTFSTYAMSWVRQAPGKGLEW |
| | scFc | | VSAISGSGGSTFYAESVKGRFTISRDNSKNTLSLQMNSLRAEDTAVY |
| | | | YCAKHDYSNYPYFDYWGQGTLVTVSSGGGGSGGGGSGGGGSEIVLTQ |
| | | | SPGTLSLSPGERATLSCRASQSVRSSYLAWYQQKPGQAPRLLIYGAS |
| | | | SRATGIPDRFSGSGSGTDFTLTISRLEPEDFAVYYCQQYGDLPFTFG |
| | | | PGTKLEIK |
| 694. | CD70_7xCD3- | bispecific | EVQLLESGGGLVQPGGSLRLSCAASGFTFSTYAMSWVRQAPGKGLEW |
| | scFc | molecule | VSAISGSGGSTFYAESVKGRFTISRDNSKNTLSLQMNSLRAEDTAVY |
| | | | YCAKHDYSNYPYFDYWGQGTLVTVSSGGGGSGGGGSGGGGSEIVLTQ |
| | | | SPGTLSLSPGERATLSCRASQSVRSSYLAWYQQKPGQAPRLLIYGAS |
| | | | SRATGIPDRFSGSGSGTDFTLTISRLEPEDFAVYYCQQYGDLPFTFG |
| | | | PGTKLEIKSGGGGSEVQLVESGGGLVQPGGSLKLSCAASGFTFNKYA |
| | | | MNWVRQAPGKGLEWVARIRSKYNNYATYYADSVKDRFTISRDDSKNT |
| | | | AYLQMNNLKTEDTAVYYCVRHGNFGNSYISYWAYWGQGTLVTVSSGG |
| | | | GGSGGGGSGGGGSQTVVTQEPSLTVSPGGTVTLTCGSSTGAVTSGNY |
| | | | PNWVQQKPGQAPRGLIGGTKFLAPGTPARFSGSLLGGKAALTLSGVQ |
| | | | PEDEAEYYCVLWYSNRWVFGGGTKLTVL |
| 695. | CD70_7xCD3- | bispecific | EVQLLESGGGLVQPGGSLRLSCAASGFTFSTYAMSWVRQAPGKGLEW |
| | scFc | HLE | VSAISGSGGSTFYAESVKGRFTISRDNSKNTLSLQMNSLRAEDTAVY |
| | | molecule | YCAKHDYSNYPYFDYWGQGTLVTVSSGGGGSGGGGSGGGGSEIVLTQ |
| | | | SPGTLSLSPGERATLSCRASQSVRSSYLAWYQQKPGQAPRLLIYGAS |
| | | | SRATGIPDRFSGSGSGTDFTLTISRLEPEDFAVYYCQQYGDLPFTFG |
| | | | PGTKLEIKSGGGGSEVQLVESGGGLVQPGGSLKLSCAASGFTFNKYA |
| | | | MNWVRQAPGKGLEWVARIRSKYNNYATYYADSVKDRFTISRDDSKNT |
| | | | AYLQMNNLKTEDTAVYYCVRHGNFGNSYISYWAYWGQGTLVTVSSGG |
| | | | GGSGGGGSGGGGSQTVVTQEPSLTVSPGGTVTLTCGSSTGAVTSGNY |
| | | | PNWVQQKPGQAPRGLIGGTKFLAPGTPARFSGSLLGGKAALTLSGVQ |
| | | | PEDEAEYYCVLWYSNRWVFGGGTKLTVLGGGGDKTHTCPPCPAPELL |
| | | | GGPSVFLFPPKPKDTLMISRTPEVTCVVVDVSHEDPEVKFNWYVDGV |
| | | | EVHNAKTKPCEEQYGSTYRCVSVLTVLHQDWLNGKEYKCKVSNKALP |
| | | | APIEKTISKAKGQPREPQVYTLPPSREEMTKNQVSLTCLVKGFYPSD |
| | | | IAVEWESNGQPENNYKTTPPVLDSDGSFFLYSKLTVDKSRWQQGNVF |
| | | | SCSVMHEALHNHYTQKSLSLSPGKGGGGSGGGGSGGGGSGGGGSGGG |
| | | | GSGGGGSDKTHTCPPCPAPELLGGPSVFLFPPKPKDTLMISRTPEVT |
| | | | CVVVDVSHEDPEVKFNWYVDGVEVHNAKTKPCEEQYGSTYRCVSVLT |
| | | | VLHQDWLNGKEYKCKVSNKALPAPIEKTISKAKGQPREPQVYTLPPS |
| | | | REEMTKNQVSLTCLVKGFYPSDIAVEWESNGQPENNYKTTPPVLDSD |
| | | | GSFFLYSKLTVDKSRWQQGNVFSCSVMHEALHNHYTQKSLSLSPGK |
| 696. | CD70_8_CCx | VH CDR1 | TYAMS |
| | CD3-scFc | | |
| 697. | CD70_8_CCx | VH CDR2 | AISGSGGRTFYAESVEG |
| | CD3-scFc | | |
| 698. | CD70_8_CCx | VH CDR3 | HDYSNYPYFDY |
| | CD3-scFc | | |
| 699. | CD70_8_CCx | VL CDR1 | RASQSVRSTYLA |
| | CD3-scFc | | |
| 700. | CD70_8_CCx | VL CDR2 | GASSRAT |
| | CD3-scFc | | |
| 701. | CD70_8_CCx | VL CDR3 | QQYGDLPFT |
| | CD3-scFc | | |
| 702. | CD70_8_CCx | VH | EVQLLESGGGMVQPGGSLRLSCAASGFTFSTYAMSWVRQAPGKCLEW |
| | CD3-scFc | | VSAISGSGGRTFYAESVEGRFTISRDNSKNTLYLQMNSLRAEDTAVY |
| | | | YCAKHDYSNYPYFDYWGQGTLVTVSS |
| 703. | CD70_8_CCx | VL | EIVLTQSPGTLSLSPGERATLSCRASQSVRSTYLAWYQQKPGQAPRL |
| | CD3-scFc | | LIYGASSRATGIPDRFSGSGSGTDFTLTISRLEPEDFAVYSCQQYGD |
| | | | LPFTFGCGTKLEIK |
| 704. | CD70_8_CCx | scFv | EVQLLESGGGMVQPGGSLRLSCAASGFTFSTYAMSWVRQAPGKCLEW |
| | CD3-scFc | | VSAISGSGGRTFYAESVEGRFTISRDNSKNTLYLQMNSLRAEDTAVY |
| | | | YCAKHDYSNYPYFDYWGQGTLVTVSSGGGGSGGGGSGGGGSEIVLTQ |
| | | | SPGTLSLSPGERATLSCRASQSVRSTYLAWYQQKPGQAPRLLIYGAS |
| | | | SRATGIPDRFSGSGSGTDFTLTISRLEPEDFAVYSCQQYGDLPFTFG |
| | | | CGTKLEIK |
| 705. | CD70_8_CCx | bispecific | EVQLLESGGGMVQPGGSLRLSCAASGFTFSTYAMSWVRQAPGKCLEW |
| | CD3-scFc | molecule | VSAISGSGGRTFYAESVEGRFTISRDNSKNTLYLQMNSLRAEDTAVY |
| | | | YCAKHDYSNYPYFDYWGQGTLVTVSSGGGGSGGGGSGGGGSEIVLTQ |
| | | | SPGTLSLSPGERATLSCRASQSVRSTYLAWYQQKPGQAPRLLIYGAS |
| | | | SRATGIPDRFSGSGSGTDFTLTISRLEPEDFAVYSCQQYGDLPFTFG |
| | | | CGTKLEIKSGGGGSEVQLVESGGGLVQPGGSLKLSCAASGFTFNKYA |
| | | | MNWVRQAPGKGLEWVARIRSKYNNYATYYADSVKDRFTISRDDSKNT |
| | | | AYLQMNNLKTEDTAVYYCVRHGNFGNSYISYWAYWGQGTLVTVSSGG |
| | | | GGSGGGGSGGGGSQTVVTQEPSLTVSPGGTVTLTCGSSTGAVTSGNY |
| | | | PNWVQQKPGQAPRGLIGGTKFLAPGTPARFSGSLLGGKAALTLSGVQ |
| | | | PEDEAEYYCVLWYSNRWVFGGGTKLTVL |
| 706. | CD70_8_CCx | bispecific | EVQLLESGGGMVQPGGSLRLSCAASGFTFSTYAMSWVRQAPGKCLEW |
| | CD3-scFc | HLE | VSAISGSGGRTFYAESVEGRFTISRDNSKNTLYLQMNSLRAEDTAVY |
| | | molecule | YCAKHDYSNYPYFDYWGQGTLVTVSSGGGGSGGGGSGGGGSEIVLTQ |
| | | | SPGTLSLSPGERATLSCRASQSVRSTYLAWYQQKPGQAPRLLIYGAS |
| | | | SRATGIPDRFSGSGSGTDFTLTISRLEPEDFAVYSCQQYGDLPFTFG |
| | | | CGTKLEIKSGGGGSEVQLVESGGGLVQPGGSLKLSCAASGFTFNKYA |
| | | | MNWVRQAPGKGLEWVARIRSKYNNYATYYADSVKDRFTISRDDSKNT |
| | | | AYLQMNNLKTEDTAVYYCVRHGNFGNSYISYWAYWGQGTLVTVSSGG |
| | | | GGSGGGGSGGGGSQTVVTQEPSLTVSPGGTVTLTCGSSTGAVTSGNY |
| | | | PNWVQQKPGQAPRGLIGGTKFLAPGTPARFSGSLLGGKAALTLSGVQ |
| | | | PEDEAEYYCVLWYSNRWVFGGGTKLTVLGGGGDKTHTCPPCPAPELL |
| | | | GGPSVFLFPPKPKDTLMISRTPEVTCVVVDVSHEDPEVKFNWYVDGV |
| | | | EVHNAKTKPCEEQYGSTYRCVSVLTVLHQDWLNGKEYKCKVSNKALP |
| | | | APIEKTISKAKGQPREPQVYTLPPSREEMTKNQVSLTCLVKGFYPSD |
| | | | IAVEWESNGQPENNYKTTPPVLDSDGSFFLYSKLTVDKSRWQQGNVF |
| | | | SCSVMHEALHNHYTQKSLSLSPGKGGGGSGGGGSGGGGSGGGGSGGG |
| | | | GSGGGGSDKTHTCPPCPAPELLGGPSVFLFPPKPKDTLMISRTPEVT |
| | | | CVVVDVSHEDPEVKFNWYVDGVEVHNAKTKPCEEQYGSTYRCVSVLT |
| | | | VLHQDWLNGKEYKCKVSNKALPAPIEKTISKAKGQPREPQVYTLPPS |
| | | | REEMTKNQVSLTCLVKGFYPSDIAVEWESNGQPENNYKTTPPVLDSD |
| | | | GSFFLYSKLTVDKSRWQQGNVFSCSVMHEALHNHYTQKSLSLSPGK |
| 707. | CD70_8xCD3- | VH | EVQLLESGGGMVQPGGSLRLSCAASGFTFSTYAMSWVRQAPGKGLEW |
| | scFc | | VSAISGSGGRTFYAESVEGRFTISRDNSKNTLYLQMNSLRAEDTAVY |
| | | | YCAKHDYSNYPYFDYWGQGTLVTVSS |
| 708. | CD70_8xCD3- | VL | EIVLTQSPGTLSLSPGERATLSCRASQSVRSTYLAWYQQKPGQAPRL |
| | scFc | | LIYGASSRATGIPDRFSGSGSGTDFTLTISRLEPEDFAVYSCQQYGD |
| | | | LPFTFGPGTKLEIK |
| 709. | CD70_8xCD3- | scFv | EVQLLESGGGMVQPGGSLRLSCAASGFTFSTYAMSWVRQAPGKGLEW |
| | scFc | | VSAISGSGGRTFYAESVEGRFTISRDNSKNTLYLQMNSLRAEDTAVY |
| | | | YCAKHDYSNYPYFDYWGQGTLVTVSSGGGGSGGGGSGGGGSEIVLTQ |
| | | | SPGTLSLSPGERATLSCRASQSVRSTYLAWYQQKPGQAPRLLIYGAS |
| | | | SRATGIPDRFSGSGSGTDFTLTISRLEPEDFAVYSCQQYGDLPFTFG |
| | | | PGTKLEIK |
| 710. | CD70_8xCD3- | bispecific | EVQLLESGGGMVQPGGSLRLSCAASGFTFSTYAMSWVRQAPGKGLEW |
| | scFc | molecule | VSAISGSGGRTFYAESVEGRFTISRDNSKNTLYLQMNSLRAEDTAVY |
| | | | YCAKHDYSNYPYFDYWGQGTLVTVSSGGGGSGGGGSGGGGSEIVLTQ |
| | | | SPGTLSLSPGERATLSCRASQSVRSTYLAWYQQKPGQAPRLLIYGAS |
| | | | SRATGIPDRFSGSGSGTDFTLTISRLEPEDFAVYSCQQYGDLPFTFG |
| | | | PGTKLEIKSGGGGSEVQLVESGGGLVQPGGSLKLSCAASGFTFNKYA |
| | | | MNWVRQAPGKGLEWVARIRSKYNNYATYYADSVKDRFTISRDDSKNT |
| | | | AYLQMNNLKTEDTAVYYCVRHGNFGNSYISYWAYWGQGTLVTVSSGG |
| | | | GGSGGGGSGGGGSQTVVTQEPSLTVSPGGTVTLTCGSSTGAVTSGNY |
| | | | PNWVQQKPGQAPRGLIGGTKFLAPGTPARFSGSLLGGKAALTLSGVQ |
| | | | PEDEAEYYCVLWYSNRWVFGGGTKLTVL |
| 711. | CD70_8xCD3- | bispecific | EVQLLESGGGMVQPGGSLRLSCAASGFTFSTYAMSWVRQAPGKGLEW |
| | scFc | HLE | VSAISGSGGRTFYAESVEGRFTISRDNSKNTLYLQMNSLRAEDTAVY |
| | | molecule | YCAKHDYSNYPYFDYWGQGTLVTVSSGGGGSGGGGSGGGGSEIVLTQ |
| | | | SPGTLSLSPGERATLSCRASQSVRSTYLAWYQQKPGQAPRLLIYGAS |
| | | | SRATGIPDRFSGSGSGTDFTLTISRLEPEDFAVYSCQQYGDLPFTFG |
| | | | PGTKLEIKSGGGGSEVQLVESGGGLVQPGGSLKLSCAASGFTFNKYA |
| | | | MNWVRQAPGKGLEWVARIRSKYNNYATYYADSVKDRFTISRDDSKNT |
| | | | AYLQMNNLKTEDTAVYYCVRHGNFGNSYISYWAYWGQGTLVTVSSGG |
| | | | GGSGGGGSGGGGSQTVVTQEPSLTVSPGGTVTLTCGSSTGAVTSGNY |
| | | | PNWVQQKPGQAPRGLIGGTKFLAPGTPARFSGSLLGGKAALTLSGVQ |
| | | | PEDEAEYYCVLWYSNRWVFGGGTKLTVLGGGGDKTHTCPPCPAPELL |
| | | | GGPSVFLFPPKPKDTLMISRTPEVTCVVVDVSHEDPEVKFNWYVDGV |
| | | | EVHNAKTKPCEEQYGSTYRCVSVLTVLHQDWLNGKEYKCKVSNKALP |
| | | | APIEKTISKAKGQPREPQVYTLPPSREEMTKNQVSLTCLVKGFYPSD |
| | | | IAVEWESNGQPENNYKTTPPVLDSDGSFFLYSKLTVDKSRWQQGNVF |
| | | | SCSVMHEALHNHYTQKSLSLSPGKGGGGSGGGGSGGGGSGGGGSGGG |
| | | | GSGGGGSDKTHTCPPCPAPELLGGPSVFLFPPKPKDTLMISRTPEVT |
| | | | CVVVDVSHEDPEVKFNWYVDGVEVHNAKTKPCEEQYGSTYRCVSVLT |
| | | | VLHQDWLNGKEYKCKVSNKALPAPIEKTISKAKGQPREPQVYTLPPS |
| | | | REEMTKNQVSLTCLVKGFYPSDIAVEWESNGQPENNYKTTPPVLDSD |
| | | | GSFFLYSKLTVDKSRWQQGNVFSCSVMHEALHNHYTQKSLSLSPGK |
| 712. | CD70_9_CCx | VH CDR1 | SYAMS |
| | CD3-scFc | | |
| 713. | CD70_9_CCx | VH CDR2 | AISGSGGYTYYAESVKG |
| | CD3-scFc | | |
| 714. | CD70_9_CCx | VH CDR3 | HDYSNYPYFDY |
| | CD3-scFc | | |
| 715. | CD70_9_CCx | VL CDR1 | RASQSVRSNYLA |
| | CD3-scFc | | |
| 716. | CD70_9_CCx | VL CDR2 | GASSRAT |
| | CD3-scFc | | |
| 717. | CD70_9_CCx | VL CDR3 | QQYGDLPFT |
| | CD3-scFc | | |
| 718. | CD70_9_CCx | VH | EVQLLESGGGLVQPGGSLRLSCAASGFTFSSYAMSWVRQAPGKCLEW |
| | CD3-scFc | | VSAISGSGGYTYYAESVKGRFTISRDNSKNTLYLQMNSLRAEDTAVY |
| | | | YCAKHDYSNYPYFDYWGQGTLVTVSS |
| 719. | CD70_9_CCx | VL | EIVLTQSPGTLSLSPGERATLSCRASQSVRSNYLAWYQQKPGQAPRL |
| | CD3-scFc | | LIYGASSRATGIPDRFSGSGSGTDFTLTISRLEPEDFAVYYCQQYGD |
| | | | LPFTFGCGTKVEIK |
| 720. | CD70_9_CCx | scFv | EVQLLESGGGLVQPGGSLRLSCAASGFTFSSYAMSWVRQAPGKCLEW |
| | CD3-scFc | | VSAISGSGGYTYYAESVKGRFTISRDNSKNTLYLQMNSLRAEDTAVY |
| | | | YCAKHDYSNYPYFDYWGQGTLVTVSSGGGGSGGGGSGGGGSEIVLTQ |
| | | | SPGTLSLSPGERATLSCRASQSVRSNYLAWYQQKPGQAPRLLIYGAS |
| | | | SRATGIPDRFSGSGSGTDFTLTISRLEPEDFAVYYCQQYGDLPFTFG |
| | | | CGTKVEIK |
| 721. | CD70_9_CCx | bispecific | EVQLLESGGGLVQPGGSLRLSCAASGFTFSSYAMSWVRQAPGKCLEW |
| | CD3-scFc | molecule | VSAISGSGGYTYYAESVKGRFTISRDNSKNTLYLQMNSLRAEDTAVY |
| | | | YCAKHDYSNYPYFDYWGQGTLVTVSSGGGGSGGGGSGGGGSEIVLTQ |
| | | | SPGTLSLSPGERATLSCRASQSVRSNYLAWYQQKPGQAPRLLIYGAS |
| | | | SRATGIPDRFSGSGSGTDFTLTISRLEPEDFAVYYCQQYGDLPFTFG |
| | | | CGTKVEIKSGGGGSEVQLVESGGGLVQPGGSLKLSCAASGFTFNKYA |
| | | | MNWVRQAPGKGLEWVARIRSKYNNYATYYADSVKDRFTISRDDSKNT |
| | | | AYLQMNNLKTEDTAVYYCVRHGNFGNSYISYWAYWGQGTLVTVSSGG |
| | | | GGSGGGGSGGGGSQTVVTQEPSLTVSPGGTVTLTCGSSTGAVTSGNY |
| | | | PNWVQQKPGQAPRGLIGGTKFLAPGTPARFSGSLLGGKAALTLSGVQ |
| | | | PEDEAEYYCVLWYSNRWVFGGGTKLTVL |
| 722. | CD70_9_CCx | bispecific | EVQLLESGGGLVQPGGSLRLSCAASGFTFSSYAMSWVRQAPGKCLEW |
| | CD3-scFc | HLE | VSAISGSGGYTYYAESVKGRFTISRDNSKNTLYLQMNSLRAEDTAVY |
| | | molecule | YCAKHDYSNYPYFDYWGQGTLVTVSSGGGGSGGGGSGGGGSEIVLTQ |
| | | | SPGTLSLSPGERATLSCRASQSVRSNYLAWYQQKPGQAPRLLIYGAS |
| | | | SRATGIPDRFSGSGSGTDFTLTISRLEPEDFAVYYCQQYGDLPFTFG |
| | | | CGTKVEIKSGGGGSEVQLVESGGGLVQPGGSLKLSCAASGFTFNKYA |
| | | | MNWVRQAPGKGLEWVARIRSKYNNYATYYADSVKDRFTISRDDSKNT |
| | | | AYLQMNNLKTEDTAVYYCVRHGNFGNSYISYWAYWGQGTLVTVSSGG |
| | | | GGSGGGGSGGGGSQTVVTQEPSLTVSPGGTVTLTCGSSTGAVTSGNY |
| | | | PNWVQQKPGQAPRGLIGGTKFLAPGTPARFSGSLLGGKAALTLSGVQ |
| | | | PEDEAEYYCVLWYSNRWVFGGGTKLTVLGGGGDKTHTCPPCPAPELL |
| | | | GGPSVFLFPPKPKDTLMISRTPEVTCVVVDVSHEDPEVKFNWYVDGV |
| | | | EVHNAKTKPCEEQYGSTYRCVSVLTVLHQDWLNGKEYKCKVSNKALP |
| | | | APIEKTISKAKGQPREPQVYTLPPSREEMTKNQVSLTCLVKGFYPSD |
| | | | IAVEWESNGQPENNYKTTPPVLDSDGSFFLYSKLTVDKSRWQQGNVF |
| | | | SCSVMHEALHNHYTQKSLSLSPGKGGGGSGGGGSGGGGSGGGGSGGG |
| | | | GSGGGGSDKTHTCPPCPAPELLGGPSVFLFPPKPKDTLMISRTPEVT |
| | | | CVVVDVSHEDPEVKFNWYVDGVEVHNAKTKPCEEQYGSTYRCVSVLT |
| | | | VLHQDWLNGKEYKCKVSNKALPAPIEKTISKAKGQPREPQVYTLPPS |
| | | | REEMTKNQVSLTCLVKGFYPSDIAVEWESNGQPENNYKTTPPVLDSD |
| | | | GSFFLYSKLTVDKSRWQQGNVFSCSVMHEALHNHYTQKSLSLSPGK |
| 723. | CD70_9xCD3- | VH | EVQLLESGGGLVQPGGSLRLSCAASGFTFSSYAMSWVRQAPGKGLEW |
| | scFc | | VSAISGSGGYTYYAESVKGRFTISRDNSKNTLYLQMNSLRAEDTAVY |
| | | | YCAKHDYSNYPYFDYWGQGTLVTVSS |
| 724. | CD70_9xCD3- | VL | EIVLTQSPGTLSLSPGERATLSCRASQSVRSNYLAWYQQKPGQAPRL |
| | scFc | | LIYGASSRATGIPDRFSGSGSGTDFTLTISRLEPEDFAVYYCQQYGD |
| | | | LPFTFGPGTKVEIK |
| 725. | CD70_9xCD3- | scFv | EVQLLESGGGLVQPGGSLRLSCAASGFTFSSYAMSWVRQAPGKGLEW |
| | scFc | | VSAISGSGGYTYYAESVKGRFTISRDNSKNTLYLQMNSLRAEDTAVY |
| | | | YCAKHDYSNYPYFDYWGQGTLVTVSSGGGGSGGGGSGGGGSEIVLTQ |
| | | | SPGTLSLSPGERATLSCRASQSVRSNYLAWYQQKPGQAPRLLIYGAS |
| | | | SRATGIPDRFSGSGSGTDFTLTISRLEPEDFAVYYCQQYGDLPFTFG |
| | | | PGTKVEIK |
| 726. | CD70_9xCD3- | bispecific | EVQLLESGGGLVQPGGSLRLSCAASGFTFSSYAMSWVRQAPGKGLEW |
| | scFc | molecule | VSAISGSGGYTYYAESVKGRFTISRDNSKNTLYLQMNSLRAEDTAVY |
| | | | YCAKHDYSNYPYFDYWGQGTLVTVSSGGGGSGGGGSGGGGSEIVLTQ |
| | | | SPGTLSLSPGERATLSCRASQSVRSNYLAWYQQKPGQAPRLLIYGAS |
| | | | SRATGIPDRFSGSGSGTDFTLTISRLEPEDFAVYYCQQYGDLPFTFG |
| | | | PGTKVEIKSGGGGSEVQLVESGGGLVQPGGSLKLSCAASGFTFNKYA |
| | | | MNWVRQAPGKGLEWVARIRSKYNNYATYYADSVKDRFTISRDDSKNT |
| | | | AYLQMNNLKTEDTAVYYCVRHGNFGNSYISYWAYWGQGTLVTVSSGG |
| | | | GGSGGGGSGGGGSQTVVTQEPSLTVSPGGTVTLTCGSSTGAVTSGNY |
| | | | PNWVQQKPGQAPRGLIGGTKFLAPGTPARFSGSLLGGKAALTLSGVQ |
| | | | PEDEAEYYCVLWYSNRWVFGGGTKLTVL |
| 727. | CD70_9xCD3- | bispecific | EVQLLESGGGLVQPGGSLRLSCAASGFTFSSYAMSWVRQAPGKGLEW |
| | scFc | HLE | VSAISGSGGYTYYAESVKGRFTISRDNSKNTLYLQMNSLRAEDTAVY |
| | | molecule | YCAKHDYSNYPYFDYWGQGTLVTVSSGGGGSGGGGSGGGGSEIVLTQ |
| | | | SPGTLSLSPGERATLSCRASQSVRSNYLAWYQQKPGQAPRLLIYGAS |
| | | | SRATGIPDRFSGSGSGTDFTLTISRLEPEDFAVYYCQQYGDLPFTFG |
| | | | PGTKVEIKSGGGGSEVQLVESGGGLVQPGGSLKLSCAASGFTFNKYA |
| | | | MNWVRQAPGKGLEWVARIRSKYNNYATYYADSVKDRFTISRDDSKNT |
| | | | AYLQMNNLKTEDTAVYYCVRHGNFGNSYISYWAYWGQGTLVTVSSGG |
| | | | GGSGGGGSGGGGSQTVVTQEPSLTVSPGGTVTLTCGSSTGAVTSGNY |
| | | | PNWVQQKPGQAPRGLIGGTKFLAPGTPARFSGSLLGGKAALTLSGVQ |
| | | | PEDEAEYYCVLWYSNRWVFGGGTKLTVLGGGGDKTHTCPPCPAPELL |
| | | | GGPSVFLFPPKPKDTLMISRTPEVTCVVVDVSHEDPEVKFNWYVDGV |
| | | | EVHNAKTKPCEEQYGSTYRCVSVLTVLHQDWLNGKEYKCKVSNKALP |
| | | | APIEKTISKAKGQPREPQVYTLPPSREEMTKNQVSLTCLVKGFYPSD |
| | | | IAVEWESNGQPENNYKTTPPVLDSDGSFFLYSKLTVDKSRWQQGNVF |
| | | | SCSVMHEALHNHYTQKSLSLSPGKGGGGSGGGGSGGGGSGGGGSGGG |
| | | | GSGGGGSDKTHTCPPCPAPELLGGPSVFLFPPKPKDTLMISRTPEVT |
| | | | CVVVDVSHEDPEVKFNWYVDGVEVHNAKTKPCEEQYGSTYRCVSVLT |
| | | | VLHQDWLNGKEYKCKVSNKALPAPIEKTISKAKGQPREPQVYTLPPS |
| | | | REEMTKNQVSLTCLVKGFYPSDIAVEWESNGQPENNYKTTPPVLDSD |
| | | | GSFFLYSKLTVDKSRWQQGNVFSCSVMHEALHNHYTQKSLSLSPGK |
| 728. | CD70_10_CC | VH CDR1 | SYAMS |
| | xCD3-scFc | | |
| 729. | CD70_10_CC | VH CDR2 | AISGSGGSTFYAESVKG |
| | xCD3-scFc | | |
| 730. | CD70_10_CC | VH CDR3 | HDYSNYPYFDY |
| | xCD3-scFc | | |
| 731. | CD70_10_CC | VL CDR1 | RASQSVRSSYLA |
| | xCD3-scFc | | |
| 732. | CD70_10_CC | VL CDR2 | GASSRAT |
| | xCD3-scFc | | |
| 733. | CD70_10_CC | VL CDR3 | QQYGDLPFT |
| | xCD3-scFc | | |
| 734. | CD70_10_CC | VH | EVQLLESGGGLAQPGGSLRLSCAASGFTFSSYAMSWVRQAPGKCLEW |
| | xCD3-scFc | | VSAISGSGGSTFYAESVKGRFTISRDNSKNTLYLQMNSLRAEDTAVY |
| | | | FCAKHDYSNYPYFDYWGQGTLVTVSS |
| 735. | CD70_10_CC | VL | EIVLTQSPGTLSLSPGERATLSCRASQSVRSSYLAWYQQKPGQAPRL |
| | xCD3-scFc | | LIYGASSRATGIPDRFSGSGSGTDFTLTISRLEPEDFAVYYCQQYGD |
| | | | LPFTFGCGTKVEIK |
| 736. | CD70_10_CC | scFv | EVQLLESGGGLAQPGGSLRLSCAASGFTFSSYAMSWVRQAPGKCLEW |
| | xCD3-scFc | | VSAISGSGGSTFYAESVKGRFTISRDNSKNTLYLQMNSLRAEDTAVY |
| | | | FCAKHDYSNYPYFDYWGQGTLVTVSSGGGGSGGGGSGGGGSEIVLTQ |
| | | | SPGTLSLSPGERATLSCRASQSVRSSYLAWYQQKPGQAPRLLIYGAS |
| | | | SRATGIPDRFSGSGSGTDFTLTISRLEPEDFAVYYCQQYGDLPFTFG |
| | | | CGTKVEIK |
| 737. | CD70_10_CC | bispecific | EVQLLESGGGLAQPGGSLRLSCAASGFTFSSYAMSWVRQAPGKCLEW |
| | xCD3-scFc | molecule | VSAISGSGGSTFYAESVKGRFTISRDNSKNTLYLQMNSLRAEDTAVY |
| | | | FCAKHDYSNYPYFDYWGQGTLVTVSSGGGGSGGGGSGGGGSEIVLTQ |
| | | | SPGTLSLSPGERATLSCRASQSVRSSYLAWYQQKPGQAPRLLIYGAS |
| | | | SRATGIPDRFSGSGSGTDFTLTISRLEPEDFAVYYCQQYGDLPFTFG |
| | | | CGTKVEIKSGGGGSEVQLVESGGGLVQPGGSLKLSCAASGFTFNKYA |
| | | | MNWVRQAPGKGLEWVARIRSKYNNYATYYADSVKDRFTISRDDSKNT |
| | | | AYLQMNNLKTEDTAVYYCVRHGNFGNSYISYWAYWGQGTLVTVSSGG |
| | | | GGSGGGGSGGGGSQTVVTQEPSLTVSPGGTVTLTCGSSTGAVTSGNY |
| | | | PNWVQQKPGQAPRGLIGGTKFLAPGTPARFSGSLLGGKAALTLSGVQ |
| | | | PEDEAEYYCVLWYSNRWVFGGGTKLTVL |
| 738. | CD70_10_CC | bispecific | EVQLLESGGGLAQPGGSLRLSCAASGFTFSSYAMSWVRQAPGKCLEW |
| | xCD3-scFc | HLE | VSAISGSGGSTFYAESVKGRFTISRDNSKNTLYLQMNSLRAEDTAVY |
| | | molecule | FCAKHDYSNYPYFDYWGQGTLVTVSSGGGGSGGGGSGGGGSEIVLTQ |
| | | | SPGTLSLSPGERATLSCRASQSVRSSYLAWYQQKPGQAPRLLIYGAS |
| | | | SRATGIPDRFSGSGSGTDFTLTISRLEPEDFAVYYCQQYGDLPFTFG |
| | | | CGTKVEIKSGGGGSEVQLVESGGGLVQPGGSLKLSCAASGFTFNKYA |
| | | | MNWVRQAPGKGLEWVARIRSKYNNYATYYADSVKDRFTISRDDSKNT |
| | | | AYLQMNNLKTEDTAVYYCVRHGNFGNSYISYWAYWGQGTLVTVSSGG |
| | | | GGSGGGGSGGGGSQTVVTQEPSLTVSPGGTVTLTCGSSTGAVTSGNY |
| | | | PNWVQQKPGQAPRGLIGGTKFLAPGTPARFSGSLLGGKAALTLSGVQ |
| | | | PEDEAEYYCVLWYSNRWVFGGGTKLTVLGGGGDKTHTCPPCPAPELL |
| | | | GGPSVFLFPPKPKDTLMISRTPEVTCVVVDVSHEDPEVKFNWYVDGV |
| | | | EVHNAKTKPCEEQYGSTYRCVSVLTVLHQDWLNGKEYKCKVSNKALP |
| | | | APIEKTISKAKGQPREPQVYTLPPSREEMTKNQVSLTCLVKGFYPSD |
| | | | IAVEWESNGQPENNYKTTPPVLDSDGSFFLYSKLTVDKSRWQQGNVF |
| | | | SCSVMHEALHNHYTQKSLSLSPGKGGGGSGGGGSGGGGSGGGGSGGG |
| | | | GSGGGGSDKTHTCPPCPAPELLGGPSVFLFPPKPKDTLMISRTPEVT |
| | | | CVVVDVSHEDPEVKFNWYVDGVEVHNAKTKPCEEQYGSTYRCVSVLT |
| | | | VLHQDWLNGKEYKCKVSNKALPAPIEKTISKAKGQPREPQVYTLPPS |
| | | | REEMTKNQVSLTCLVKGFYPSDIAVEWESNGQPENNYKTTPPVLDSD |
| | | | GSFFLYSKLTVDKSRWQQGNVFSCSVMHEALHNHYTQKSLSLSPGK |
| 739. | CD70_10xCD | VH | EVQLLESGGGLAQPGGSLRLSCAASGFTFSSYAMSWVRQAPGKGLEW |
| | 3-scFc | | VSAISGSGGSTFYAESVKGRFTISRDNSKNTLYLQMNSLRAEDTAVY |
| | | | FCAKHDYSNYPYFDYWGQGTLVTVSS |
| 740. | CD70_10xCD | VL | EIVLTQSPGTLSLSPGERATLSCRASQSVRSSYLAWYQQKPGQAPRL |
| | 3-scFc | | LIYGASSRATGIPDRFSGSGSGTDFTLTISRLEPEDFAVYYCQQYGD |
| | | | LPFTFGPGTKVEIK |
| 741. | CD70_10xCD | scFv | EVQLLESGGGLAQPGGSLRLSCAASGFTFSSYAMSWVRQAPGKGLEW |
| | 3-scFc | | VSAISGSGGSTFYAESVKGRFTISRDNSKNTLYLQMNSLRAEDTAVY |
| | | | FCAKHDYSNYPYFDYWGQGTLVTVSSGGGGSGGGGSGGGGSEIVLTQ |
| | | | SPGTLSLSPGERATLSCRASQSVRSSYLAWYQQKPGQAPRLLIYGAS |
| | | | SRATGIPDRFSGSGSGTDFTLTISRLEPEDFAVYYCQQYGDLPFTFG |
| | | | PGTKVEIK |
| 742. | CD70_10xCD | bispecific | EVQLLESGGGLAQPGGSLRLSCAASGFTFSSYAMSWVRQAPGKGLEW |
| | 3-scFc | molecule | VSAISGSGGSTFYAESVKGRFTISRDNSKNTLYLQMNSLRAEDTAVY |
| | | | FCAKHDYSNYPYFDYWGQGTLVTVSSGGGGSGGGGSGGGGSEIVLTQ |
| | | | SPGTLSLSPGERATLSCRASQSVRSSYLAWYQQKPGQAPRLLIYGAS |
| | | | SRATGIPDRFSGSGSGTDFTLTISRLEPEDFAVYYCQQYGDLPFTFG |
| | | | PGTKVEIKSGGGGSEVQLVESGGGLVQPGGSLKLSCAASGFTFNKYA |
| | | | MNWVRQAPGKGLEWVARIRSKYNNYATYYADSVKDRFTISRDDSKNT |
| | | | AYLQMNNLKTEDTAVYYCVRHGNFGNSYISYWAYWGQGTLVTVSSGG |
| | | | GGSGGGGSGGGGSQTVVTQEPSLTVSPGGTVTLTCGSSTGAVTSGNY |
| | | | PNWVQQKPGQAPRGLIGGTKFLAPGTPARFSGSLLGGKAALTLSGVQ |
| | | | PEDEAEYYCVLWYSNRWVFGGGTKLTVL |
| 743. | CD70_10xCD | bispedfic | EVQLLESGGGLAQPGGSLRLSCAASGFTFSSYAMSWVRQAPGKGLEW |
| | 3-scFc | HLE | VSAISGSGGSTFYAESVKGRFTISRDNSKNTLYLQMNSLRAEDTAVY |
| | | molecule | FCAKHDYSNYPYFDYWGQGTLVTVSSGGGGSGGGGSGGGGSEIVLTQ |
| | | | SPGTLSLSPGERATLSCRASQSVRSSYLAWYQQKPGQAPRLLIYGAS |
| | | | SRATGIPDRFSGSGSGTDFTLTISRLEPEDFAVYYCQQYGDLPFTFG |
| | | | PGTKVEIKSGGGGSEVQLVESGGGLVQPGGSLKLSCAASGFTFNKYA |
| | | | MNWVRQAPGKGLEWVARIRSKYNNYATYYADSVKDRFTISRDDSKNT |
| | | | AYLQMNNLKTEDTAVYYCVRHGNFGNSYISYWAYWGQGTLVTVSSGG |
| | | | GGSGGGGSGGGGSQTVVTQEPSLTVSPGGTVTLTCGSSTGAVTSGNY |
| | | | PNWVQQKPGQAPRGLIGGTKFLAPGTPARFSGSLLGGKAALTLSGVQ |
| | | | PEDEAEYYCVLWYSNRWVFGGGTKLTVLGGGGDKTHTCPPCPAPELL |
| | | | GGPSVFLFPPKPKDTLMISRTPEVTCVVVDVSHEDPEVKFNWYVDGV |
| | | | EVHNAKTKPCEEQYGSTYRCVSVLTVLHQDWLNGKEYKCKVSNKALP |
| | | | APIEKTISKAKGQPREPQVYTLPPSREEMTKNQVSLTCLVKGFYPSD |
| | | | IAVEWESNGQPENNYKTTPPVLDSDGSFFLYSKLTVDKSRWQQGNVF |
| | | | SCSVMHEALHNHYTQKSLSLSPGKGGGGSGGGGSGGGGSGGGGSGGG |
| | | | GSGGGGSDKTHTCPPCPAPELLGGPSVFLFPPKPKDTLMISRTPEVT |
| | | | CVVVDVSHEDPEVKFNWYVDGVEVHNAKTKPCEEQYGSTYRCVSVLT |
| | | | VLHQDWLNGKEYKCKVSNKALPAPIEKTISKAKGQPREPQVYTLPPS |
| | | | REEMTKNQVSLTCLVKGFYPSDIAVEWESNGQPENNYKTTPPVLDSD |
| | | | GSFFLYSKLTVDKSRWQQGNVFSCSVMHEALHNHYTQKSLSLSPGK |
| 744. | CD70_11_CC | VH CDR1 | SYAMS |
| | xCD3-scFc | | |
| 745. | CD70_11_CC | VH CDR2 | AISGSGGRTFYAESVEG |
| | xCD3-scFc | | |
| 746. | CD70_11_CC | VH CDR3 | HDYSNYPYFDY |
| | xCD3-scFc | | |
| 747. | CD70_11_CC | VL CDR1 | RASQSVRSNYLA |
| | xCD3-scFc | | |
| 748. | CD70_11_CC | VL CDR2 | GASSRAT |
| | xCD3-scFc | | |
| 749. | CD70_11_CC | VL CDR3 | QQYGDLPFT |
| | xCD3-scFc | | |
| 750. | CD70_11_CC | VH | EVQLLESGGGMVQPGGSLRLSCAASGFTFSSYAMSWVRQAPGKCLEW |
| | xCD3-scFc | | VSAISGSGGRTFYAESVEGRFTISRDNSKNTLYLQMNSLRAEDTAVY |
| | | | YCAKHDYSNYPYFDYWGQGTLVTVSS |
| 751. | CD70_11_CC | VL | EIVLTQSPGTLSLSPGERATLSCRASQSVRSNYLAWYQQKPGQAPRL |
| | xCD3-scFc | | LIYGASSRATGIPDRFSGSGSGTDFTLTISRLEPEDFAVYYCQQYGD |
| | | | LPFTFGCGTKVEIK |
| 752. | CD70_11_CC | scFv | EVQLLESGGGMVQPGGSLRLSCAASGFTFSSYAMSWVRQAPGKCLEW |
| | xCD3-scFc | | VSAISGSGGRTFYAESVEGRFTISRDNSKNTLYLQMNSLRAEDTAVY |
| | | | YCAKHDYSNYPYFDYWGQGTLVTVSSGGGGSGGGGSGGGGSEIVLTQ |
| | | | SPGTLSLSPGERATLSCRASQSVRSNYLAWYQQKPGQAPRLLIYGAS |
| | | | SRATGIPDRFSGSGSGTDFTLTISRLEPEDFAVYYCQQYGDLPFTFG |
| | | | CGTKVEIK |
| 753. | CD70_11_CC | bispecific | EVQLLESGGGMVQPGGSLRLSCAASGFTFSSYAMSWVRQAPGKCLEW |
| | xCD3-scFc | molecule | VSAISGSGGRTFYAESVEGRFTISRDNSKNTLYLQMNSLRAEDTAVY |
| | | | YCAKHDYSNYPYFDYWGQGTLVTVSSGGGGSGGGGSGGGGSEIVLTQ |
| | | | SPGTLSLSPGERATLSCRASQSVRSNYLAWYQQKPGQAPRLLIYGAS |
| | | | SRATGIPDRFSGSGSGTDFTLTISRLEPEDFAVYYCQQYGDLPFTFG |
| | | | CGTKVEIKSGGGGSEVQLVESGGGLVQPGGSLKLSCAASGFTFNKYA |
| | | | MNWVRQAPGKGLEWVARIRSKYNNYATYYADSVKDRFTISRDDSKNT |
| | | | AYLQMNNLKTEDTAVYYCVRHGNFGNSYISYWAYWGQGTLVTVSSGG |
| | | | GGSGGGGSGGGGSQTVVTQEPSLTVSPGGTVTLTCGSSTGAVTSGNY |
| | | | PNWVQQKPGQAPRGLIGGTKFLAPGTPARFSGSLLGGKAALTLSGVQ |
| | | | PEDEAEYYCVLWYSNRWVFGGGTKLTVL |
| 754. | CD70_11_CC | bispecific | EVQLLESGGGMVQPGGSLRLSCAASGFTFSSYAMSWVRQAPGKCLEW |
| | xCD3-scFc | HLE | VSAISGSGGRTFYAESVEGRFTISRDNSKNTLYLQMNSLRAEDTAVY |
| | | molecule | YCAKHDYSNYPYFDYWGQGTLVTVSSGGGGSGGGGSGGGGSEIVLTQ |
| | | | SPGTLSLSPGERATLSCRASQSVRSNYLAWYQQKPGQAPRLLIYGAS |
| | | | SRATGIPDRFSGSGSGTDFTLTISRLEPEDFAVYYCQQYGDLPFTFG |
| | | | CGTKVEIKSGGGGSEVQLVESGGGLVQPGGSLKLSCAASGFTFNKYA |
| | | | MNWVRQAPGKGLEWVARIRSKYNNYATYYADSVKDRFTISRDDSKNT |
| | | | AYLQMNNLKTEDTAVYYCVRHGNFGNSYISYWAYWGQGTLVTVSSGG |
| | | | GGSGGGGSGGGGSQTVVTQEPSLTVSPGGTVTLTCGSSTGAVTSGNY |
| | | | PNWVQQKPGQAPRGLIGGTKFLAPGTPARFSGSLLGGKAALTLSGVQ |
| | | | PEDEAEYYCVLWYSNRWVFGGGTKLTVLGGGGDKTHTCPPCPAPELL |
| | | | GGPSVFLFPPKPKDTLMISRTPEVTCVVVDVSHEDPEVKFNWYVDGV |
| | | | EVHNAKTKPCEEQYGSTYRCVSVLTVLHQDWLNGKEYKCKVSNKALP |
| | | | APIEKTISKAKGQPREPQVYTLPPSREEMTKNQVSLTCLVKGFYPSD |
| | | | IAVEWESNGQPENNYKTTPPVLDSDGSFFLYSKLTVDKSRWQQGNVF |
| | | | SCSVMHEALHNHYTQKSLSLSPGKGGGGSGGGGSGGGGSGGGGSGGG |
| | | | GSGGGGSDKTHTCPPCPAPELLGGPSVFLFPPKPKDTLMISRTPEVT |
| | | | CVVVDVSHEDPEVKFNWYVDGVEVHNAKTKPCEEQYGSTYRCVSVLT |
| | | | VLHQDWLNGKEYKCKVSNKALPAPIEKTISKAKGQPREPQVYTLPPS |
| | | | REEMTKNQVSLTCLVKGFYPSDIAVEWESNGQPENNYKTTPPVLDSD |
| | | | GSFFLYSKLTVDKSRWQQGNVFSCSVMHEALHNHYTQKSLSLSPGK |
| 755. | CD70_11xCD | VH | EVQLLESGGGMVQPGGSLRLSCAASGFTFSSYAMSWVRQAPGKGLEW |
| | 3-scFc | | VSAISGSGGRTFYAESVEGRFTISRDNSKNTLYLQMNSLRAEDTAVY |
| | | | YCAKHDYSNYPYFDYWGQGTLVTVSS |
| 756. | CD70_11xCD | VL | EIVLTQSPGTLSLSPGERATLSCRASQSVRSNYLAWYQQKPGQAPRL |
| | 3-scFc | | LIYGASSRATGIPDRFSGSGSGTDFTLTISRLEPEDFAVYYCQQYGD |
| | | | LPFTFGPGTKVEIK |
| 757. | CD70_11xCD | scFv | EVQLLESGGGMVQPGGSLRLSCAASGFTFSSYAMSWVRQAPGKGLEW |
| | 3-scFc | | VSAISGSGGRTFYAESVEGRFTISRDNSKNTLYLQMNSLRAEDTAVY |
| | | | YCAKHDYSNYPYFDYWGQGTLVTVSSGGGGSGGGGSGGGGSEIVLTQ |
| | | | SPGTLSLSPGERATLSCRASQSVRSNYLAWYQQKPGQAPRLLIYGAS |
| | | | SRATGIPDRFSGSGSGTDFTLTISRLEPEDFAVYYCQQYGDLPFTFG |
| | | | PGTKVEIK |
| 758. | CD70_11xCD | bispecific | EVQLLESGGGMVQPGGSLRLSCAASGFTFSSYAMSWVRQAPGKGLEW |
| | 3-scFc | molecule | VSAISGSGGRTFYAESVEGRFTISRDNSKNTLYLQMNSLRAEDTAVY |
| | | | YCAKHDYSNYPYFDYWGQGTLVTVSSGGGGSGGGGSGGGGSEIVLTQ |
| | | | SPGTLSLSPGERATLSCRASQSVRSNYLAWYQQKPGQAPRLLIYGAS |
| | | | SRATGIPDRFSGSGSGTDFTLTISRLEPEDFAVYYCQQYGDLPFTFG |
| | | | PGTKVEIKSGGGGSEVQLVESGGGLVQPGGSLKLSCAASGFTFNKYA |
| | | | MNWVRQAPGKGLEWVARIRSKYNNYATYYADSVKDRFTISRDDSKNT |
| | | | AYLQMNNLKTEDTAVYYCVRHGNFGNSYISYWAYWGQGTLVTVSSGG |
| | | | GGSGGGGSGGGGSQTVVTQEPSLTVSPGGTVTLTCGSSTGAVTSGNY |
| | | | PNWVQQKPGQAPRGLIGGTKFLAPGTPARFSGSLLGGKAALTLSGVQ |
| | | | PEDEAEYYCVLWYSNRWVFGGGTKLTVL |
| 759. | CD70_11xCD | bispecific | EVQLLESGGGMVQPGGSLRLSCAASGFTFSSYAMSWVRQAPGKGLEW |
| | 3-scFc | HLE | VSAISGSGGRTFYAESVEGRFTISRDNSKNTLYLQMNSLRAEDTAVY |
| | | molecule | YCAKHDYSNYPYFDYWGQGTLVTVSSGGGGSGGGGSGGGGSEIVLTQ |
| | | | SPGTLSLSPGERATLSCRASQSVRSNYLAWYQQKPGQAPRLLIYGAS |
| | | | SRATGIPDRFSGSGSGTDFTLTISRLEPEDFAVYYCQQYGDLPFTFG |
| | | | PGTKVEIKSGGGGSEVQLVESGGGLVQPGGSLKLSCAASGFTFNKYA |
| | | | MNWVRQAPGKGLEWVARIRSKYNNYATYYADSVKDRFTISRDDSKNT |
| | | | AYLQMNNLKTEDTAVYYCVRHGNFGNSYISYWAYWGQGTLVTVSSGG |
| | | | GGSGGGGSGGGGSQTVVTQEPSLTVSPGGTVTLTCGSSTGAVTSGNY |
| | | | PNWVQQKPGQAPRGLIGGTKFLAPGTPARFSGSLLGGKAALTLSGVQ |
| | | | PEDEAEYYCVLWYSNRWVFGGGTKLTVLGGGGDKTHTCPPCPAPELL |
| | | | GGPSVFLFPPKPKDTLMISRTPEVTCVVVDVSHEDPEVKFNWYVDGV |
| | | | EVHNAKTKPCEEQYGSTYRCVSVLTVLHQDWLNGKEYKCKVSNKALP |
| | | | APIEKTISKAKGQPREPQVYTLPPSREEMTKNQVSLTCLVKGFYPSD |
| | | | IAVEWESNGQPENNYKTTPPVLDSDGSFFLYSKLTVDKSRWQQGNVF |
| | | | SCSVMHEALHNHYTQKSLSLSPGKGGGGSGGGGSGGGGSGGGGSGGG |
| | | | GSGGGGSDKTHTCPPCPAPELLGGPSVFLFPPKPKDTLMISRTPEVT |
| | | | CVVVDVSHEDPEVKFNWYVDGVEVHNAKTKPCEEQYGSTYRCVSVLT |
| | | | VLHQDWLNGKEYKCKVSNKALPAPIEKTISKAKGQPREPQVYTLPPS |
| | | | REEMTKNQVSLTCLVKGFYPSDIAVEWESNGQPENNYKTTPPVLDSD |
| | | | GSFFLYSKLTVDKSRWQQGNVFSCSVMHEALHNHYTQKSLSLSPGK |
| 760. | CD70_12_CC | VH CDR1 | SYAMS |
| | xCD3-scFc | | |
| 761. | CD70_12_CC | VH CDR2 | AISGSGGRTFYAESVEG |
| | xCD3-scFc | | |
| 762. | CD70_12_CC | VH CDR3 | HDYSNYPYFDY |
| | xCD3-scFc | | |
| 763. | CD70_12_CC | VL CDR1 | RASQSVRSSYLA |
| | xCD3-scFc | | |
| 764. | CD70_12_CC | VL CDR2 | GASSRAT |
| | xCD3-scFc | | |
| 765. | CD70_12_CC | VL CDR3 | QQYGSSPFT |
| | xCD3-scFc | | |
| 766. | CD70_12_CC | VH | EVQLLESGGGMVQPGGSLRLSCAASGFTFSSYAMSWVRQAPGKCLEW |
| | xCD3-scFc | | VSAISGSGGRTFYAESVEGRFTISRDNSKNTLYLQMNSLRAEDTAVY |
| | | | YCAKHDYSNYPYFDYWGQGTLVTVSS |
| 767. | CD70_12_CC | VL | EIVLTQSPGTLSLSPGERATLSCRASQSVRSSYLAWYQQKPGQAPRL |
| | xCD3-scFc | | LIYGASSRATGIPDRFSGSGSGTDFTLTISRLEPEDFAVYYCQQYGS |
| | | | SPFTFGCGTKVEIK |
| 768. | CD7012CC | scFv | EVQLLESGGGMVQPGGSLRLSCAASGFTFSSYAMSWVRQAPGKCLEW |
| | xCD3-scFc | | VSAISGSGGRTFYAESVEGRFTISRDNSKNTLYLQMNSLRAEDTAVY |
| | | | YCAKHDYSNYPYFDYWGQGTLVTVSSGGGGSGGGGSGGGGSEIVLTQ |
| | | | SPGTLSLSPGERATLSCRASQSVRSSYLAWYQQKPGQAPRLLIYGAS |
| | | | SRATGIPDRFSGSGSGTDFTLTISRLEPEDFAVYYCQQYGSSPFTFG |
| | | | CGTKVEIK |
| 769. | CD70_12_CC | bispecific | EVQLLESGGGMVQPGGSLRLSCAASGFTFSSYAMSWVRQAPGKCLEW |
| | xCD3-scFc | molecule | VSAISGSGGRTFYAESVEGRFTISRDNSKNTLYLQMNSLRAEDTAVY |
| | | | YCAKHDYSNYPYFDYWGQGTLVTVSSGGGGSGGGGSGGGGSEIVLTQ |
| | | | SPGTLSLSPGERATLSCRASQSVRSSYLAWYQQKPGQAPRLLIYGAS |
| | | | SRATGIPDRFSGSGSGTDFTLTISRLEPEDFAVYYCQQYGSSPFTFG |
| | | | CGTKVEIKSGGGGSEVQLVESGGGLVQPGGSLKLSCAASGFTFNKYA |
| | | | MNWVRQAPGKGLEWVARIRSKYNNYATYYADSVKDRFTISRDDSKNT |
| | | | AYLQMNNLKTEDTAVYYCVRHGNFGNSYISYWAYWGQGTLVTVSSGG |
| | | | GGSGGGGSGGGGSQTVVTQEPSLTVSPGGTVTLTCGSSTGAVTSGNY |
| | | | PNWVQQKPGQAPRGLIGGTKFLAPGTPARFSGSLLGGKAALTLSGVQ |
| | | | PEDEAEYYCVLWYSNRWVFGGGTKLTVL |
| 770. | CD70_12_CC | bispecific | EVQLLESGGGMVQPGGSLRLSCAASGFTFSSYAMSWVRQAPGKCLEW |
| | xCD3-scFc | HLE | VSAISGSGGRTFYAESVEGRFTISRDNSKNTLYLQMNSLRAEDTAVY |
| | | molecule | YCAKHDYSNYPYFDYWGQGTLVTVSSGGGGSGGGGSGGGGSEIVLTQ |
| | | | SPGTLSLSPGERATLSCRASQSVRSSYLAWYQQKPGQAPRLLIYGAS |
| | | | SRATGIPDRFSGSGSGTDFTLTISRLEPEDFAVYYCQQYGSSPFTFG |
| | | | CGTKVEIKSGGGGSEVQLVESGGGLVQPGGSLKLSCAASGFTFNKYA |
| | | | MNWVRQAPGKGLEWVARIRSKYNNYATYYADSVKDRFTISRDDSKNT |
| | | | AYLQMNNLKTEDTAVYYCVRHGNFGNSYISYWAYWGQGTLVTVSSGG |
| | | | GGSGGGGSGGGGSQTVVTQEPSLTVSPGGTVTLTCGSSTGAVTSGNY |
| | | | PNWVQQKPGQAPRGLIGGTKFLAPGTPARFSGSLLGGKAALTLSGVQ |
| | | | PEDEAEYYCVLWYSNRWVFGGGTKLTVLGGGGDKTHTCPPCPAPELL |
| | | | GGPSVFLFPPKPKDTLMISRTPEVTCVVVDVSHEDPEVKFNWYVDGV |
| | | | EVHNAKTKPCEEQYGSTYRCVSVLTVLHQDWLNGKEYKCKVSNKALP |
| | | | APIEKTISKAKGQPREPQVYTLPPSREEMTKNQVSLTCLVKGFYPSD |
| | | | IAVEWESNGQPENNYKTTPPVLDSDGSFFLYSKLTVDKSRWQQGNVF |
| | | | SCSVMHEALHNHYTQKSLSLSPGKGGGGSGGGGSGGGGSGGGGSGGG |
| | | | GSGGGGSDKTHTCPPCPAPELLGGPSVFLFPPKPKDTLMISRTPEVT |
| | | | CVVVDVSHEDPEVKFNWYVDGVEVHNAKTKPCEEQYGSTYRCVSVLT |
| | | | VLHQDWLNGKEYKCKVSNKALPAPIEKTISKAKGQPREPQVYTLPPS |
| | | | REEMTKNQVSLTCLVKGFYPSDIAVEWESNGQPENNYKTTPPVLDSD |
| | | | GSFFLYSKLTVDKSRWQQGNVFSCSVMHEALHNHYTQKSLSLSPGK |
| 771. | CD70_12xCD | VH | EVQLLESGGGMVQPGGSLRLSCAASGFTFSSYAMSWVRQAPGKGLEW |
| | 3-scFc | | VSAISGSGGRTFYAESVEGRFTISRDNSKNTLYLQMNSLRAEDTAVY |
| | | | YCAKHDYSNYPYFDYWGQGTLVTVSS |
| 772. | CD70_12xCD | VL | EIVLTQSPGTLSLSPGERATLSCRASQSVRSSYLAWYQQKPGQAPRL |
| | 3-scFc | | LIYGASSRATGIPDRFSGSGSGTDFTLTISRLEPEDFAVYYCQQYGS |
| | | | SPFTFGPGTKVEIK |
| 773. | CD70_12xCD | scFv | EVQLLESGGGMVQPGGSLRLSCAASGFTFSSYAMSWVRQAPGKGLEW |
| | 3-scFc | | VSAISGSGGRTFYAESVEGRFTISRDNSKNTLYLQMNSLRAEDTAVY |
| | | | YCAKHDYSNYPYFDYWGQGTLVTVSSGGGGSGGGGSGGGGSEIVLTQ |
| | | | SPGTLSLSPGERATLSCRASQSVRSSYLAWYQQKPGQAPRLLIYGAS |
| | | | SRATGIPDRFSGSGSGTDFTLTISRLEPEDFAVYYCQQYGSSPFTFG |
| | | | PGTKVEIK |
| 774. | CD70_12xCD | bispecific | EVQLLESGGGMVQPGGSLRLSCAASGFTFSSYAMSWVRQAPGKGLEW |
| | 3-scFc | molecule | VSAISGSGGRTFYAESVEGRFTISRDNSKNTLYLQMNSLRAEDTAVY |
| | | | YCAKHDYSNYPYFDYWGQGTLVTVSSGGGGSGGGGSGGGGSEIVLTQ |
| | | | SPGTLSLSPGERATLSCRASQSVRSSYLAWYQQKPGQAPRLLIYGAS |
| | | | SRATGIPDRFSGSGSGTDFTLTISRLEPEDFAVYYCQQYGSSPFTFG |
| | | | PGTKVEIKSGGGGSEVQLVESGGGLVQPGGSLKLSCAASGFTFNKYA |
| | | | MNWVRQAPGKGLEWVARIRSKYNNYATYYADSVKDRFTISRDDSKNT |
| | | | AYLQMNNLKTEDTAVYYCVRHGNFGNSYISYWAYWGQGTLVTVSSGG |
| | | | GGSGGGGSGGGGSQTVVTQEPSLTVSPGGTVTLTCGSSTGAVTSGNY |
| | | | PNWVQQKPGQAPRGLIGGTKFLAPGTPARFSGSLLGGKAALTLSGVQ |
| | | | PEDEAEYYCVLWYSNRWVFGGGTKLTVL |
| 775. | CD70_12xCD | bispecific | EVQLLESGGGMVQPGGSLRLSCAASGFTFSSYAMSWVRQAPGKGLEW |
| | 3-scFc | HLE | VSAISGSGGRTFYAESVEGRFTISRDNSKNTLYLQMNSLRAEDTAVY |
| | | molecule | YCAKHDYSNYPYFDYWGQGTLVTVSSGGGGSGGGGSGGGGSEIVLTQ |
| | | | SPGTLSLSPGERATLSCRASQSVRSSYLAWYQQKPGQAPRLLIYGAS |
| | | | SRATGIPDRFSGSGSGTDFTLTISRLEPEDFAVYYCQQYGSSPFTFG |
| | | | PGTKVEIKSGGGGSEVQLVESGGGLVQPGGSLKLSCAASGFTFNKYA |
| | | | MNWVRQAPGKGLEWVARIRSKYNNYATYYADSVKDRFTISRDDSKNT |
| | | | AYLQMNNLKTEDTAVYYCVRHGNFGNSYISYWAYWGQGTLVTVSSGG |
| | | | GGSGGGGSGGGGSQTVVTQEPSLTVSPGGTVTLTCGSSTGAVTSGNY |
| | | | PNWVQQKPGQAPRGLIGGTKFLAPGTPARFSGSLLGGKAALTLSGVQ |
| | | | PEDEAEYYCVLWYSNRWVFGGGTKLTVLGGGGDKTHTCPPCPAPELL |
| | | | GGPSVFLFPPKPKDTLMISRTPEVTCVVVDVSHEDPEVKFNWYVDGV |
| | | | EVHNAKTKPCEEQYGSTYRCVSVLTVLHQDWLNGKEYKCKVSNKALP |
| | | | APIEKTISKAKGQPREPQVYTLPPSREEMTKNQVSLTCLVKGFYPSD |
| | | | IAVEWESNGQPENNYKTTPPVLDSDGSFFLYSKLTVDKSRWQQGNVF |
| | | | SCSVMHEALHNHYTQKSLSLSPGKGGGGSGGGGSGGGGSGGGGSGGG |
| | | | GSGGGGSDKTHTCPPCPAPELLGGPSVFLFPPKPKDTLMISRTPEVT |
| | | | CVVVDVSHEDPEVKFNWYVDGVEVHNAKTKPCEEQYGSTYRCVSVLT |
| | | | VLHQDWLNGKEYKCKVSNKALPAPIEKTISKAKGQPREPQVYTLPPS |
| | | | REEMTKNQVSLTCLVKGFYPSDIAVEWESNGQPENNYKTTPPVLDSD |
| | | | GSFFLYSKLTVDKSRWQQGNVFSCSVMHEALHNHYTQKSLSLSPGK |
| 776. | CD70_13_CC | VH CDR1 | SYAMS |
| | xCD3-scFc | | |
| 777. | CD70_13_CC | VH CDR2 | AISGSGGSTFYAESVQG |
| | xCD3-scFc | | |
| 778. | CD70_13_CC | VH CDR3 | HDYSNYPYFDY |
| | xCD3-scFc | | |
| 779. | CD70_13_CC | VL CDR1 | RASQSVRGNYLA |
| | xCD3-scFc | | |
| 780. | CD70_13_CC | VL CDR2 | GASSRAT |
| | xCD3-scFc | | |
| 781. | CD70_13_CC | VL CDR3 | QQYGYSPFT |
| | xCD3-scFc | | |
| 782. | CD70_13_CC | VH | EVQLLESGGGLVQPGGSLRLSCAASGFTFSSYAMSWVRQAPGKCLEW |
| | xCD3-scFc | | VSAISGSGGSTFYAESVQGRFTISRDNSKNTLYLQVNSLRAEDTAVY |
| | | | YCARHDYSNYPYFDYWGQGTLVTVSS |
| 783. | CD70_13_CC | VL | EIVLTQSPGTLSLSPGERATLSCRASQSVRGNYLAWYQQKPGQAPRL |
| | xCD3-scFc | | LIYGASSRATGIPDRFSGSGSGTDFTLTISRLEPEDFAVYYCQQYGY |
| | | | SPFTFGCGTKVEIK |
| 784. | CD70_13_CC | scFv | EVQLLESGGGLVQPGGSLRLSCAASGFTFSSYAMSWVRQAPGKCLEW |
| | xCD3-scFc | | VSAISGSGGSTFYAESVQGRFTISRDNSKNTLYLQVNSLRAEDTAVY |
| | | | YCARHDYSNYPYFDYWGQGTLVTVSSGGGGSGGGGSGGGGSEIVLTQ |
| | | | SPGTLSLSPGERATLSCRASQSVRGNYLAWYQQKPGQAPRLLIYGAS |
| | | | SRATGIPDRFSGSGSGTDFTLTISRLEPEDFAVYYCQQYGYSPFTFG |
| | | | CGTKVEIK |
| 785. | CD70_13_CC | bispecific | EVQLLESGGGLVQPGGSLRLSCAASGFTFSSYAMSWVRQAPGKCLEW |
| | xCD3-scFc | molecule | VSAISGSGGSTFYAESVQGRFTISRDNSKNTLYLQVNSLRAEDTAVY |
| | | | YCARHDYSNYPYFDYWGQGTLVTVSSGGGGSGGGGSGGGGSEIVLTQ |
| | | | SPGTLSLSPGERATLSCRASQSVRGNYLAWYQQKPGQAPRLLIYGAS |
| | | | SRATGIPDRFSGSGSGTDFTLTISRLEPEDFAVYYCQQYGYSPFTFG |
| | | | CGTKVEIKSGGGGSEVQLVESGGGLVQPGGSLKLSCAASGFTFNKYA |
| | | | MNWVRQAPGKGLEWVARIRSKYNNYATYYADSVKDRFTISRDDSKNT |
| | | | AYLQMNNLKTEDTAVYYCVRHGNFGNSYISYWAYWGQGTLVTVSSGG |
| | | | GGSGGGGSGGGGSQTVVTQEPSLTVSPGGTVTLTCGSSTGAVTSGNY |
| | | | PNWVQQKPGQAPRGLIGGTKFLAPGTPARFSGSLLGGKAALTLSGVQ |
| | | | PEDEAEYYCVLWYSNRWVFGGGTKLTVL |
| 786. | CD70_13_CC | bispecific | EVQLLESGGGLVQPGGSLRLSCAASGFTFSSYAMSWVRQAPGKCLEW |
| | xCD3-scFc | HLE | VSAISGSGGSTFYAESVQGRFTISRDNSKNTLYLQVNSLRAEDTAVY |
| | | molecule | YCARHDYSNYPYFDYWGQGTLVTVSSGGGGSGGGGSGGGGSEIVLTQ |
| | | | SPGTLSLSPGERATLSCRASQSVRGNYLAWYQQKPGQAPRLLIYGAS |
| | | | SRATGIPDRFSGSGSGTDFTLTISRLEPEDFAVYYCQQYGYSPFTFG |
| | | | CGTKVEIKSGGGGSEVQLVESGGGLVQPGGSLKLSCAASGFTFNKYA |
| | | | MNWVRQAPGKGLEWVARIRSKYNNYATYYADSVKDRFTISRDDSKNT |
| | | | AYLQMNNLKTEDTAVYYCVRHGNFGNSYISYWAYWGQGTLVTVSSGG |
| | | | GGSGGGGSGGGGSQTVVTQEPSLTVSPGGTVTLTCGSSTGAVTSGNY |
| | | | PNWVQQKPGQAPRGLIGGTKFLAPGTPARFSGSLLGGKAALTLSGVQ |
| | | | PEDEAEYYCVLWYSNRWVFGGGTKLTVLGGGGDKTHTCPPCPAPELL |
| | | | GGPSVFLFPPKPKDTLMISRTPEVTCVVVDVSHEDPEVKFNWYVDGV |
| | | | EVHNAKTKPCEEQYGSTYRCVSVLTVLHQDWLNGKEYKCKVSNKALP |
| | | | APIEKTISKAKGQPREPQVYTLPPSREEMTKNQVSLTCLVKGFYPSD |
| | | | IAVEWESNGQPENNYKTTPPVLDSDGSFFLYSKLTVDKSRWQQGNVF |
| | | | SCSVMHEALHNHYTQKSLSLSPGKGGGGSGGGGSGGGGSGGGGSGGG |
| | | | GSGGGGSDKTHTCPPCPAPELLGGPSVFLFPPKPKDTLMISRTPEVT |
| | | | CVVVDVSHEDPEVKFNWYVDGVEVHNAKTKPCEEQYGSTYRCVSVLT |
| | | | VLHQDWLNGKEYKCKVSNKALPAPIEKTISKAKGQPREPQVYTLPPS |
| | | | REEMTKNQVSLTCLVKGFYPSDIAVEWESNGQPENNYKTTPPVLDSD |
| | | | GSFFLYSKLTVDKSRWQQGNVFSCSVMHEALHNHYTQKSLSLSPGK |
| 787. | CD70_13xCD | VH | EVQLLESGGGLVQPGGSLRLSCAASGFTFSSYAMSWVRQAPGKGLEW |
| | 3-scFc | | VSAISGSGGSTFYAESVQGRFTISRDNSKNTLYLQVNSLRAEDTAVY |
| | | | YCARHDYSNYPYFDYWGQGTLVTVSS |
| 788. | CD70_13xCD | VL | EIVLTQSPGTLSLSPGERATLSCRASQSVRGNYLAWYQQKPGQAPRL |
| | 3-scFc | | LIYGASSRATGIPDRFSGSGSGTDFTLTISRLEPEDFAVYYCQQYGY |
| | | | SPFTFGPGTKVEIK |
| 789. | CD70_13xCD | scFv | EVQLLESGGGLVQPGGSLRLSCAASGFTFSSYAMSWVRQAPGKGLEW |
| | 3-scFc | | VSAISGSGGSTFYAESVQGRFTISRDNSKNTLYLQVNSLRAEDTAVY |
| | | | YCARHDYSNYPYFDYWGQGTLVTVSSGGGGSGGGGSGGGGSEIVLTQ |
| | | | SPGTLSLSPGERATLSCRASQSVRGNYLAWYQQKPGQAPRLLIYGAS |
| | | | SRATGIPDRFSGSGSGTDFTLTISRLEPEDFAVYYCQQYGYSPFTFG |
| | | | PGTKVEIK |
| 790. | CD70_13xCD | bispecific | EVQLLESGGGLVQPGGSLRLSCAASGFTFSSYAMSWVRQAPGKGLEW |
| | 3-scFc | molecule | VSAISGSGGSTFYAESVQGRFTISRDNSKNTLYLQVNSLRAEDTAVY |
| | | | YCARHDYSNYPYFDYWGQGTLVTVSSGGGGSGGGGSGGGGSEIVLTQ |
| | | | SPGTLSLSPGERATLSCRASQSVRGNYLAWYQQKPGQAPRLLIYGAS |
| | | | SRATGIPDRFSGSGSGTDFTLTISRLEPEDFAVYYCQQYGYSPFTFG |
| | | | PGTKVEIKSGGGGSEVQLVESGGGLVQPGGSLKLSCAASGFTFNKYA |
| | | | MNWVRQAPGKGLEWVARIRSKYNNYATYYADSVKDRFTISRDDSKNT |
| | | | AYLQMNNLKTEDTAVYYCVRHGNFGNSYISYWAYWGQGTLVTVSSGG |
| | | | GGSGGGGSGGGGSQTVVTQEPSLTVSPGGTVTLTCGSSTGAVTSGNY |
| | | | PNWVQQKPGQAPRGLIGGTKFLAPGTPARFSGSLLGGKAALTLSGVQ |
| | | | PEDEAEYYCVLWYSNRWVFGGGTKLTVL |
| 791. | CD70_13xCD | bispecific | EVQLLESGGGLVQPGGSLRLSCAASGFTFSSYAMSWVRQAPGKGLEW |
| | 3-scFc | HLE | VSAISGSGGSTFYAESVQGRFTISRDNSKNTLYLQVNSLRAEDTAVY |
| | | molecule | YCARHDYSNYPYFDYWGQGTLVTVSSGGGGSGGGGSGGGGSEIVLTQ |
| | | | SPGTLSLSPGERATLSCRASQSVRGNYLAWYQQKPGQAPRLLIYGAS |
| | | | SRATGIPDRFSGSGSGTDFTLTISRLEPEDFAVYYCQQYGYSPFTFG |
| | | | PGTKVEIKSGGGGSEVQLVESGGGLVQPGGSLKLSCAASGFTFNKYA |
| | | | MNWVRQAPGKGLEWVARIRSKYNNYATYYADSVKDRFTISRDDSKNT |
| | | | AYLQMNNLKTEDTAVYYCVRHGNFGNSYISYWAYWGQGTLVTVSSGG |
| | | | GGSGGGGSGGGGSQTVVTQEPSLTVSPGGTVTLTCGSSTGAVTSGNY |
| | | | PNWVQQKPGQAPRGLIGGTKFLAPGTPARFSGSLLGGKAALTLSGVQ |
| | | | PEDEAEYYCVLWYSNRWVFGGGTKLTVLGGGGDKTHTCPPCPAPELL |
| | | | GGPSVFLFPPKPKDTLMISRTPEVTCVVVDVSHEDPEVKFNWYVDGV |
| | | | EVHNAKTKPCEEQYGSTYRCVSVLTVLHQDWLNGKEYKCKVSNKALP |
| | | | APIEKTISKAKGQPREPQVYTLPPSREEMTKNQVSLTCLVKGFYPSD |
| | | | IAVEWESNGQPENNYKTTPPVLDSDGSFFLYSKLTVDKSRWQQGNVF |
| | | | SCSVMHEALHNHYTQKSLSLSPGKGGGGSGGGGSGGGGSGGGGSGGG |
| | | | GSGGGGSDKTHTCPPCPAPELLGGPSVFLFPPKPKDTLMISRTPEVT |
| | | | CVVVDVSHEDPEVKFNWYVDGVEVHNAKTKPCEEQYGSTYRCVSVLT |
| | | | VLHQDWLNGKEYKCKVSNKALPAPIEKTISKAKGQPREPQVYTLPPS |
| | | | REEMTKNQVSLTCLVKGFYPSDIAVEWESNGQPENNYKTTPPVLDSD |
| | | | GSFFLYSKLTVDKSRWQQGNVFSCSVMHEALHNHYTQKSLSLSPGK |
| 792. | CD70_14_CC | VH CDR1 | TYAMS |
| | xCD3-scFc | | |
| 793. | CD70_14_CC | VH CDR2 | AISGSGGGTFYAESVKG |
| | xCD3-scFc | | |
| 794. | CD70_14_CC | VH CDR3 | HDYSNYPYFDY |
| | xCD3-scFc | | |
| 795. | CD70_14_CC | VL CDR1 | RASQSIRSNYLA |
| | xCD3-scFc | | |
| 796. | CD70_14_CC | VL CDR2 | GASSRAT |
| | xCD3-scFc | | |
| 797. | CD70_14_CC | VL CDR3 | QQYGSSPFT |
| | xCD3-scFc | | |
| 798. | CD70_14_CC | VH | EVQLLESGGGLVQPGGSLRLSCAASGFTFSTYAMSWVRQAPGKCLEW |
| | xCD3-scFc | | VSAISGSGGGTFYAESVKGRFTISRDNSKNTLYLQMNSLRAEDTAVY |
| | | | YCAKHDYSNYPYFDYWGQGTLVTVSS |
| 799. | CD70_14_CC | VL | EIVLTQSPGTLSLSPGERATLSCRASQSIRSNYLAWYQQKPGQAPRL |
| | xCD3-scFc | | LIYGASSRATGIPDRFSGSGSGTDFTLTISRLEPEDFAVYYCQQYGS |
| | | | SPFTFGCGTKVEIK |
| 800. | CD70_14_CC | scFv | EVQLLESGGGLVQPGGSLRLSCAASGFTFSTYAMSWVRQAPGKCLEW |
| | xCD3-scFc | | VSAISGSGGGTFYAESVKGRFTISRDNSKNTLYLQMNSLRAEDTAVY |
| | | | YCAKHDYSNYPYFDYWGQGTLVTVSSGGGGSGGGGSGGGGSEIVLTQ |
| | | | SPGTLSLSPGERATLSCRASQSIRSNYLAWYQQKPGQAPRLLIYGAS |
| | | | SRATGIPDRFSGSGSGTDFTLTISRLEPEDFAVYYCQQYGSSPFTFG |
| | | | CGTKVEIK |
| 801. | CD70_14_CC | bispecific | EVQLLESGGGLVQPGGSLRLSCAASGFTFSTYAMSWVRQAPGKCLEW |
| | xCD3-scFc | molecule | VSAISGSGGGTFYAESVKGRFTISRDNSKNTLYLQMNSLRAEDTAVY |
| | | | YCAKHDYSNYPYFDYWGQGTLVTVSSGGGGSGGGGSGGGGSEIVLTQ |
| | | | SPGTLSLSPGERATLSCRASQSIRSNYLAWYQQKPGQAPRLLIYGAS |
| | | | SRATGIPDRFSGSGSGTDFTLTISRLEPEDFAVYYCQQYGSSPFTFG |
| | | | CGTKVEIKSGGGGSEVQLVESGGGLVQPGGSLKLSCAASGFTFNKYA |
| | | | MNWVRQAPGKGLEWVARIRSKYNNYATYYADSVKDRFTISRDDSKNT |
| | | | AYLQMNNLKTEDTAVYYCVRHGNFGNSYISYWAYWGQGTLVTVSSGG |
| | | | GGSGGGGSGGGGSQTVVTQEPSLTVSPGGTVTLTCGSSTGAVTSGNY |
| | | | PNWVQQKPGQAPRGLIGGTKFLAPGTPARFSGSLLGGKAALTLSGVQ |
| | | | PEDEAEYYCVLWYSNRWVFGGGTKLTVL |
| 802. | CD70_14_CC | bispecific | EVQLLESGGGLVQPGGSLRLSCAASGFTFSTYAMSWVRQAPGKCLEW |
| | xCD3-scFc | HLE | VSAISGSGGGTFYAESVKGRFTISRDNSKNTLYLQMNSLRAEDTAVY |
| | | molecule | YCAKHDYSNYPYFDYWGQGTLVTVSSGGGGSGGGGSGGGGSEIVLTQ |
| | | | SPGTLSLSPGERATLSCRASQSIRSNYLAWYQQKPGQAPRLLIYGAS |
| | | | SRATGIPDRFSGSGSGTDFTLTISRLEPEDFAVYYCQQYGSSPFTFG |
| | | | CGTKVEIKSGGGGSEVQLVESGGGLVQPGGSLKLSCAASGFTFNKYA |
| | | | MNWVRQAPGKGLEWVARIRSKYNNYATYYADSVKDRFTISRDDSKNT |
| | | | AYLQMNNLKTEDTAVYYCVRHGNFGNSYISYWAYWGQGTLVTVSSGG |
| | | | GGSGGGGSGGGGSQTVVTQEPSLTVSPGGTVTLTCGSSTGAVTSGNY |
| | | | PNWVQQKPGQAPRGLIGGTKFLAPGTPARFSGSLLGGKAALTLSGVQ |
| | | | PEDEAEYYCVLWYSNRWVFGGGTKLTVLGGGGDKTHTCPPCPAPELL |
| | | | GGPSVFLFPPKPKDTLMISRTPEVTCVVVDVSHEDPEVKFNWYVDGV |
| | | | EVHNAKTKPCEEQYGSTYRCVSVLTVLHQDWLNGKEYKCKVSNKALP |
| | | | APIEKTISKAKGQPREPQVYTLPPSREEMTKNQVSLTCLVKGFYPSD |
| | | | IAVEWESNGQPENNYKTTPPVLDSDGSFFLYSKLTVDKSRWQQGNVF |
| | | | SCSVMHEALHNHYTQKSLSLSPGKGGGGSGGGGSGGGGSGGGGSGGG |
| | | | GSGGGGSDKTHTCPPCPAPELLGGPSVFLFPPKPKDTLMISRTPEVT |
| | | | CVVVDVSHEDPEVKFNWYVDGVEVHNAKTKPCEEQYGSTYRCVSVLT |
| | | | VLHQDWLNGKEYKCKVSNKALPAPIEKTISKAKGQPREPQVYTLPPS |
| | | | REEMTKNQVSLTCLVKGFYPSDIAVEWESNGQPENNYKTTPPVLDSD |
| | | | GSFFLYSKLTVDKSRWQQGNVFSCSVMHEALHNHYTQKSLSLSPGK |
| 803. | CD70_14xCD | VH | EVQLLESGGGLVQPGGSLRLSCAASGFTFSTYAMSWVRQAPGKGLEW |
| | 3-scFc | | VSAISGSGGGTFYAESVKGRFTISRDNSKNTLYLQMNSLRAEDTAVY |
| | | | YCAKHDYSNYPYFDYWGQGTLVTVSS |
| 804. | CD70_14xCD | VL | EIVLTQSPGTLSLSPGERATLSCRASQSIRSNYLAWYQQKPGQAPRL |
| | 3-scFc | | LIYGASSRATGIPDRFSGSGSGTDFTLTISRLEPEDFAVYYCQQYGS |
| | | | SPFTFGPGTKVEIK |
| 805. | CD70_14xCD | scFv | EVQLLESGGGLVQPGGSLRLSCAASGFTFSTYAMSWVRQAPGKGLEW |
| | 3-scFc | | SGSGGGTFYAESVKGRFTISRDNSKNTLYLQMNSLRAEDTAVY |
| | | | YCAKHDYSNYPYFDYWGQGTLVTVSSGGGGSGGGGSGGGGSEIVLTQ |
| | | | SPGTLSLSPGERATLSCRASQSIRSNYLAWYQQKPGQAPRLLIYGAS |
| | | | SRATGIPDRFSGSGSGTDFTLTISRLEPEDFAVYYCQQYGSSPFTFG |
| | | | PGTKVEIK |
| 806. | CD70_14xCD | bispecific | EVQLLESGGGLVQPGGSLRLSCAASGFTFSTYAMSWVRQAPGKGLEW |
| | 3-scFc | molecule | VSAISGSGGGTFYAESVKGRFTISRDNSKNTLYLQMNSLRAEDTAVY |
| | | | YCAKHDYSNYPYFDYWGQGTLVTVSSGGGGSGGGGSGGGGSEIVLTQ |
| | | | SPGTLSLSPGERATLSCRASQSIRSNYLAWYQQKPGQAPRLLIYGAS |
| | | | SRATGIPDRFSGSGSGTDFTLTISRLEPEDFAVYYCQQYGSSPFTFG |
| | | | PGTKVEIKSGGGGSEVQLVESGGGLVQPGGSLKLSCAASGFTFNKYA |
| | | | MNWVRQAPGKGLEWVARIRSKYNNYATYYADSVKDRFTISRDDSKNT |
| | | | AYLQMNNLKTEDTAVYYCVRHGNFGNSYISYWAYWGQGTLVTVSSGG |
| | | | GGSGGGGSGGGGSQTVVTQEPSLTVSPGGTVTLTCGSSTGAVTSGNY |
| | | | PNWVQQKPGQAPRGLIGGTKFLAPGTPARFSGSLLGGKAALTLSGVQ |
| | | | PEDEAEYYCVLWYSNRWVFGGGTKLTVL |
| 807. | CD70_14xCD | bispecific | EVQLLESGGGLVQPGGSLRLSCAASGFTFSTYAMSWVRQAPGKGLEW |
| | 3-scFc | HLE | VSAISGSGGGTFYAESVKGRFTISRDNSKNTLYLQMNSLRAEDTAVY |
| | | molecule | YCAKHDYSNYPYFDYWGQGTLVTVSSGGGGSGGGGSGGGGSEIVLTQ |
| | | | SPGTLSLSPGERATLSCRASQSIRSNYLAWYQQKPGQAPRLLIYGAS |
| | | | SRATGIPDRFSGSGSGTDFTLTISRLEPEDFAVYYCQQYGSSPFTFG |
| | | | PGTKVEIKSGGGGSEVQLVESGGGLVQPGGSLKLSCAASGFTFNKYA |
| | | | MNWVRQAPGKGLEWVARIRSKYNNYATYYADSVKDRFTISRDDSKNT |
| | | | AYLQMNNLKTEDTAVYYCVRHGNFGNSYISYWAYWGQGTLVTVSSGG |
| | | | GGSGGGGSGGGGSQTVVTQEPSLTVSPGGTVTLTCGSSTGAVTSGNY |
| | | | PNWVQQKPGQAPRGLIGGTKFLAPGTPARFSGSLLGGKAALTLSGVQ |
| | | | PEDEAEYYCVLWYSNRWVFGGGTKLTVLGGGGDKTHTCPPCPAPELL |
| | | | GGPSVFLFPPKPKDTLMISRTPEVTCVVVDVSHEDPEVKFNWYVDGV |
| | | | EVHNAKTKPCEEQYGSTYRCVSVLTVLHQDWLNGKEYKCKVSNKALP |
| | | | APIEKTISKAKGQPREPQVYTLPPSREEMTKNQVSLTCLVKGFYPSD |
| | | | IAVEWESNGQPENNYKTTPPVLDSDGSFFLYSKLTVDKSRWQQGNVF |
| | | | SCSVMHEALHNHYTQKSLSLSPGKGGGGSGGGGSGGGGSGGGGSGGG |
| | | | GSGGGGSDKTHTCPPCPAPELLGGPSVFLFPPKPKDTLMISRTPEVT |
| | | | CVVVDVSHEDPEVKFNWYVDGVEVHNAKTKPCEEQYGSTYRCVSVLT |
| | | | VLHQDWLNGKEYKCKVSNKALPAPIEKTISKAKGQPREPQVYTLPPS |
| | | | REEMTKNQVSLTCLVKGFYPSDIAVEWESNGQPENNYKTTPPVLDSD |
| | | | GSFFLYSKLTVDKSRWQQGNVFSCSVMHEALHNHYTQKSLSLSPGK |
| 808. | CD70_15_CC | VH CDR1 | TYAMS |
| | xCD3-scFc | | |
| 809. | CD70_15_CC | VH CDR2 | LISGSGGRTYYAESVKG |
| | xCD3-scFc | | |
| 810. | CD70_15_CC | VH CDR3 | HDYSNYPYFDY |
| | xCD3-scFc | | |
| 811. | CD70_15_CC | VL CDR1 | RASQSVRSNYLA |
| | xCD3-scFc | | |
| 812. | CD70_15_CC | VL CDR2 | GASNRAT |
| | xCD3-scFc | | |
| 813. | CD70_15_CC | VL CDR3 | QQYGISPPT |
| | xCD3-scFc | | |
| 814. | CD70_15_CC | VH | EVQLLESGGGLVQPGGSLRLSCAASGFTFSTYAMSWVRQAPGKCLEW |
| | xCD3-scFc | | VSLISGSGGRTYYAESVKGRFTISRDNSKNTLYLQMNSLRAEDTAVY |
| | | | YCAKHDYSNYPYFDYWGQGTLVTVSS |
| 815. | CD70_15_CC | VL | EIVLTQSPGTLSLSPGERATLSCRASQSVRSNYLAWYQQKPGQAPRL |
| | xCD3-scFc | | LIYGASNRATGIPDRFSGSGSGTDFTLTISRLEPEDFAVYSCQQYGI |
| | | | SPPTFGCGTKVEIK |
| 816. | CD70_15_CC | scFv | EVQLLESGGGLVQPGGSLRLSCAASGFTFSTYAMSWVRQAPGKCLEW |
| | xCD3-scFc | | VSLISGSGGRTYYAESVKGRFTISRDNSKNTLYLQMNSLRAEDTAVY |
| | | | YCAKHDYSNYPYFDYWGQGTLVTVSSGGGGSGGGGSGGGGSEIVLTQ |
| | | | SPGTLSLSPGERATLSCRASQSVRSNYLAWYQQKPGQAPRLLIYGAS |
| | | | NRATGIPDRFSGSGSGTDFTLTISRLEPEDFAVYSCQQYGISPPTFG |
| | | | CGTKVEIK |
| 817. | CD70_15_CC | bispecific | EVQLLESGGGLVQPGGSLRLSCAASGFTFSTYAMSWVRQAPGKCLEW |
| | xCD3-scFc | molecule | VSLISGSGGRTYYAESVKGRFTISRDNSKNTLYLQMNSLRAEDTAVY |
| | | | YCAKHDYSNYPYFDYWGQGTLVTVSSGGGGSGGGGSGGGGSEIVLTQ |
| | | | SPGTLSLSPGERATLSCRASQSVRSNYLAWYQQKPGQAPRLLIYGAS |
| | | | NRATGIPDRFSGSGSGTDFTLTISRLEPEDFAVYSCQQYGISPPTFG |
| | | | CGTKVEIKSGGGGSEVQLVESGGGLVQPGGSLKLSCAASGFTFNKYA |
| | | | MNWVRQAPGKGLEWVARIRSKYNNYATYYADSVKDRFTISRDDSKNT |
| | | | AYLQMNNLKTEDTAVYYCVRHGNFGNSYISYWAYWGQGTLVTVSSGG |
| | | | GGSGGGGSGGGGSQTVVTQEPSLTVSPGGTVTLTCGSSTGAVTSGNY |
| | | | PNWVQQKPGQAPRGLIGGTKFLAPGTPARFSGSLLGGKAALTLSGVQ |
| | | | PEDEAEYYCVLWYSNRWVFGGGTKLTVL |
| 818. | CD70_15_CC | bispecific | EVQLLESGGGLVQPGGSLRLSCAASGFTFSTYAMSWVRQAPGKCLEW |
| | xCD3-scFc | HLE | VSLISGSGGRTYYAESVKGRFTISRDNSKNTLYLQMNSLRAEDTAVY |
| | | molecule | YCAKHDYSNYPYFDYWGQGTLVTVSSGGGGSGGGGSGGGGSEIVLTQ |
| | | | SPGTLSLSPGERATLSCRASQSVRSNYLAWYQQKPGQAPRLLIYGAS |
| | | | NRATGIPDRFSGSGSGTDFTLTISRLEPEDFAVYSCQQYGISPPTFG |
| | | | CGTKVEIKSGGGGSEVQLVESGGGLVQPGGSLKLSCAASGFTFNKYA |
| | | | MNWVRQAPGKGLEWVARIRSKYNNYATYYADSVKDRFTISRDDSKNT |
| | | | AYLQMNNLKTEDTAVYYCVRHGNFGNSYISYWAYWGQGTLVTVSSGG |
| | | | GGSGGGGSGGGGSQTVVTQEPSLTVSPGGTVTLTCGSSTGAVTSGNY |
| | | | PNWVQQKPGQAPRGLIGGTKFLAPGTPARFSGSLLGGKAALTLSGVQ |
| | | | PEDEAEYYCVLWYSNRWVFGGGTKLTVLGGGGDKTHTCPPCPAPELL |
| | | | GGPSVFLFPPKPKDTLMISRTPEVTCVVVDVSHEDPEVKFNWYVDGV |
| | | | EVHNAKTKPCEEQYGSTYRCVSVLTVLHQDWLNGKEYKCKVSNKALP |
| | | | APIEKTISKAKGQPREPQVYTLPPSREEMTKNQVSLTCLVKGFYPSD |
| | | | IAVEWESNGQPENNYKTTPPVLDSDGSFFLYSKLTVDKSRWQQGNVF |
| | | | SCSVMHEALHNHYTQKSLSLSPGKGGGGSGGGGSGGGGSGGGGSGGG |
| | | | GSGGGGSDKTHTCPPCPAPELLGGPSVFLFPPKPKDTLMISRTPEVT |
| | | | CVVVDVSHEDPEVKFNWYVDGVEVHNAKTKPCEEQYGSTYRCVSVLT |
| | | | VLHQDWLNGKEYKCKVSNKALPAPIEKTISKAKGQPREPQVYTLPPS |
| | | | REEMTKNQVSLTCLVKGFYPSDIAVEWESNGQPENNYKTTPPVLDSD |
| | | | GSFFLYSKLTVDKSRWQQGNVFSCSVMHEALHNHYTQKSLSLSPGK |
| 819. | CD70_15xCD | VH | EVQLLESGGGLVQPGGSLRLSCAASGFTFSTYAMSWVRQAPGKGLEW |
| | 3-scFc | | VSLISGSGGRTYYAESVKGRFTISRDNSKNTLYLQMNSLRAEDTAVY |
| | | | YCAKHDYSNYPYFDYWGQGTLVTVSS |
| 820. | CD70_15xCD | VL | EIVLTQSPGTLSLSPGERATLSCRASQSVRSNYLAWYQQKPGQAPRL |
| | 3-scFc | | LIYGASNRATGIPDRFSGSGSGTDFTLTISRLEPEDFAVYSCQQYGI |
| | | | SPPTFGGGTKVEIK |
| 821. | CD70_15xCD | scFv | EVQLLESGGGLVQPGGSLRLSCAASGFTFSTYAMSWVRQAPGKGLEW |
| | 3-scFc | | VSLISGSGGRTYYAESVKGRFTISRDNSKNTLYLQMNSLRAEDTAVY |
| | | | YCAKHDYSNYPYFDYWGQGTLVTVSSGGGGSGGGGSGGGGSEIVLTQ |
| | | | SPGTLSLSPGERATLSCRASQSVRSNYLAWYQQKPGQAPRLLIYGAS |
| | | | NRATGIPDRFSGSGSGTDFTLTISRLEPEDFAVYSCQQYGISPPTFG |
| | | | GGTKVEIK |
| 822. | CD70_15xCD | bispecific | EVQLLESGGGLVQPGGSLRLSCAASGFTFSTYAMSWVRQAPGKGLEW |
| | 3-scFc | molecule | VSLISGSGGRTYYAESVKGRFTISRDNSKNTLYLQMNSLRAEDTAVY |
| | | | YCAKHDYSNYPYFDYWGQGTLVTVSSGGGGSGGGGSGGGGSEIVLTQ |
| | | | SPGTLSLSPGERATLSCRASQSVRSNYLAWYQQKPGQAPRLLIYGAS |
| | | | NRATGIPDRFSGSGSGTDFTLTISRLEPEDFAVYSCQQYGISPPTFG |
| | | | GGTKVEIKSGGGGSEVQLVESGGGLVQPGGSLKLSCAASGFTFNKYA |
| | | | MNWVRQAPGKGLEWVARIRSKYNNYATYYADSVKDRFTISRDDSKNT |
| | | | AYLQMNNLKTEDTAVYYCVRHGNFGNSYISYWAYWGQGTLVTVSSGG |
| | | | GGSGGGGSGGGGSQTVVTQEPSLTVSPGGTVTLTCGSSTGAVTSGNY |
| | | | PNWVQQKPGQAPRGLIGGTKFLAPGTPARFSGSLLGGKAALTLSGVQ |
| | | | PEDEAEYYCVLWYSNRWVFGGGTKLTVL |
| 823. | CD70_15xCD | bispecific | EVQLLESGGGLVQPGGSLRLSCAASGFTFSTYAMSWVRQAPGKGLEW |
| | 3-scFc | HLE | VSLISGSGGRTYYAESVKGRFTISRDNSKNTLYLQMNSLRAEDTAVY |
| | | molecule | YCAKHDYSNYPYFDYWGQGTLVTVSSGGGGSGGGGSGGGGSEIVLTQ |
| | | | SPGTLSLSPGERATLSCRASQSVRSNYLAWYQQKPGQAPRLLIYGAS |
| | | | NRATGIPDRFSGSGSGTDFTLTISRLEPEDFAVYSCQQYGISPPTFG |
| | | | GGTKVEIKSGGGGSEVQLVESGGGLVQPGGSLKLSCAASGFTFNKYA |
| | | | MNWVRQAPGKGLEWVARIRSKYNNYATYYADSVKDRFTISRDDSKNT |
| | | | AYLQMNNLKTEDTAVYYCVRHGNFGNSYISYWAYWGQGTLVTVSSGG |
| | | | GGSGGGGSGGGGSQTVVTQEPSLTVSPGGTVTLTCGSSTGAVTSGNY |
| | | | PNWVQQKPGQAPRGLIGGTKFLAPGTPARFSGSLLGGKAALTLSGVQ |
| | | | PEDEAEYYCVLWYSNRWVFGGGTKLTVLGGGGDKTHTCPPCPAPELL |
| | | | GGPSVFLFPPKPKDTLMISRTPEVTCVVVDVSHEDPEVKFNWYVDGV |
| | | | EVHNAKTKPCEEQYGSTYRCVSVLTVLHQDWLNGKEYKCKVSNKALP |
| | | | APIEKTISKAKGQPREPQVYTLPPSREEMTKNQVSLTCLVKGFYPSD |
| | | | IAVEWESNGQPENNYKTTPPVLDSDGSFFLYSKLTVDKSRWQQGNVF |
| | | | SCSVMHEALHNHYTQKSLSLSPGKGGGGSGGGGSGGGGSGGGGSGGG |
| | | | GSGGGGSDKTHTCPPCPAPELLGGPSVFLFPPKPKDTLMISRTPEVT |
| | | | CVVVDVSHEDPEVKFNWYVDGVEVHNAKTKPCEEQYGSTYRCVSVLT |
| | | | VLHQDWLNGKEYKCKVSNKALPAPIEKTISKAKGQPREPQVYTLPPS |
| | | | REEMTKNQVSLTCLVKGFYPSDIAVEWESNGQPENNYKTTPPVLDSD |
| | | | GSFFLYSKLTVDKSRWQQGNVFSCSVMHEALHNHYTQKSLSLSPGK |
| 824. | CD70_16_CC | VH CDR1 | SYAMS |
| | xCD3-scFc | | |
| 825. | CD70_16_CC | VH CDR2 | AISGSGGRAQYAESVQG |
| | xCD3-scFc | | |
| 826. | CD70_16_CC | VH CDR3 | HDYSNYPYFDY |
| | xCD3-scFc | | |
| 827. | CD70_16_CC | VL CDR1 | RASQSVSSNLA |
| | xCD3-scFc | | |
| 828. | CD70_16_CC | VL CDR2 | GSSSRAT |
| | xCD3-scFc | | |
| 829. | CD70_16_CC | VL CDR3 | QQYGSSPPP |
| | xCD3-scFc | | |
| 830. | CD70_16_CC | VH | EVQLLESGGGLVQPGGSLRLSCAASGFTFSSYAMSWVRQSPGKCLEW |
| | xCD3-scFc | | VSAISGSGGRAQYAESVQGRFTVSRDNSKNTLYLQMNSLRAEDTAVY |
| | | | YCAKHDYSNYPYFDYWGQGTLVTVSS |
| 831. | CD70_16_CC | VL | EIVLTQSPATLSVSPGERATLSCRASQSVSSNLAWYQQKPGQAPRLL |
| | xCD3-scFc | | IYGSSSRATGIPDRFSGSGSGTDFTLTISRLEPEDFAVYYCQQYGSS |
| | | | PPPFGCGTKVEIK |
| 832. | CD70_16_CC | scFv | EVQLLESGGGLVQPGGSLRLSCAASGFTFSSYAMSWVRQSPGKCLEW |
| | xCD3-scFc | | VSAISGSGGRAQYAESVQGRFTVSRDNSKNTLYLQMNSLRAEDTAVY |
| | | | YCAKHDYSNYPYFDYWGQGTLVTVSSGGGGSGGGGSGGGGSEIVLTQ |
| | | | SPATLSVSPGERATLSCRASQSVSSNLAWYQQKPGQAPRLLIYGSSS |
| | | | RATGIPDRFSGSGSGTDFTLTISRLEPEDFAVYYCQQYGSSPPPFGC |
| | | | GTKVEIK |
| 833. | CD70_16_CC | bispecific | EVQLLESGGGLVQPGGSLRLSCAASGFTFSSYAMSWVRQSPGKCLEW |
| | xCD3-scFc | molecule | VSAISGSGGRAQYAESVQGRFTVSRDNSKNTLYLQMNSLRAEDTAVY |
| | | | YCAKHDYSNYPYFDYWGQGTLVTVSSGGGGSGGGGSGGGGSEIVLTQ |
| | | | SPATLSVSPGERATLSCRASQSVSSNLAWYQQKPGQAPRLLIYGSSS |
| | | | RATGIPDRFSGSGSGTDFTLTISRLEPEDFAVYYCQQYGSSPPPFGC |
| | | | GTKVEIKSGGGGSEVQLVESGGGLVQPGGSLKLSCAASGFTFNKYAM |
| | | | NWVRQAPGKGLEWVARIRSKYNNYATYYADSVKDRFTISRDDSKNTA |
| | | | YLQMNNLKTEDTAVYYCVRHGNFGNSYISYWAYWGQGTLVTVSSGGG |
| | | | GSGGGGSGGGGSQTVVTQEPSLTVSPGGTVTLTCGSSTGAVTSGNYP |
| | | | NWVQQKPGQAPRGLIGGTKFLAPGTPARFSGSLLGGKAALTLSGVQP |
| | | | EDEAEYYCVLWYSNRWVFGGGTKLTVL |
| 834. | CD70_16_CC | bispecific | EVQLLESGGGLVQPGGSLRLSCAASGFTFSSYAMSWVRQSPGKCLEW |
| | xCD3-scFc | HLE | VSAISGSGGRAQYAESVQGRFTVSRDNSKNTLYLQMNSLRAEDTAVY |
| | | molecule | YCAKHDYSNYPYFDYWGQGTLVTVSSGGGGSGGGGSGGGGSEIVLTQ |
| | | | SPATLSVSPGERATLSCRASQSVSSNLAWYQQKPGQAPRLLIYGSSS |
| | | | RATGIPDRFSGSGSGTDFTLTISRLEPEDFAVYYCQQYGSSPPPFGC |
| | | | GTKVEIKSGGGGSEVQLVESGGGLVQPGGSLKLSCAASGFTFNKYAM |
| | | | NWVRQAPGKGLEWVARIRSKYNNYATYYADSVKDRFTISRDDSKNTA |
| | | | YLQMNNLKTEDTAVYYCVRHGNFGNSYISYWAYWGQGTLVTVSSGGG |
| | | | GSGGGGSGGGGSQTVVTQEPSLTVSPGGTVTLTCGSSTGAVTSGNYP |
| | | | NWVQQKPGQAPRGLIGGTKFLAPGTPARFSGSLLGGKAALTLSGVQP |
| | | | EDEAEYYCVLWYSNRWVFGGGTKLTVLGGGGDKTHTCPPCPAPELLG |
| | | | GPSVFLFPPKPKDTLMISRTPEVTCVVVDVSHEDPEVKFNWYVDGVE |
| | | | VHNAKTKPCEEQYGSTYRCVSVLTVLHQDWLNGKEYKCKVSNKALPA |
| | | | PIEKTISKAKGQPREPQVYTLPPSREEMTKNQVSLTCLVKGFYPSDI |
| | | | AVEWESNGQPENNYKTTPPVLDSDGSFFLYSKLTVDKSRWQQGNVFS |
| | | | CSVMHEALHNHYTQKSLSLSPGKGGGGSGGGGSGGGGSGGGGSGGGG |
| | | | SGGGGSDKTHTCPPCPAPELLGGPSVFLFPPKPKDTLMISRTPEVTC |
| | | | VVVDVSHEDPEVKFNWYVDGVEVHNAKTKPCEEQYGSTYRCVSVLTV |
| | | | LHQDWLNGKEYKCKVSNKALPAPIEKTISKAKGQPREPQVYTLPPSR |
| | | | EEMTKNQVSLTCLVKGFYPSDIAVEWESNGQPENNYKTTPPVLDSDG |
| | | | SFFLYSKLTVDKSRWQQGNVFSCSVMHEALHNHYTQKSLSLSPGK |
| 835. | CD70_16xCD | VH | EVQLLESGGGLVQPGGSLRLSCAASGFTFSSYAMSWVRQSPGKGLEW |
| | 3-scFc | | VSAISGSGGRAQYAESVQGRFTVSRDNSKNTLYLQMNSLRAEDTAVY |
| | | | YCAKHDYSNYPYFDYWGQGTLVTVSS |
| 836. | CD70_16xCD | VL | EIVLTQSPATLSVSPGERATLSCRASQSVSSNLAWYQQKPGQAPRLL |
| | 3-scFc | | IYGSSSRATGIPDRFSGSGSGTDFTLTISRLEPEDFAVYYCQQYGSS |
| | | | PPPFGGGTKVEIK |
| 837. | CD70_16xCD- | scFv | EVQLLESGGGLVQPGGSLRLSCAASGFTFSSYAMSWVRQSPGKGLEW |
| | scFc | | VSAISGSGGRAQYAESVQGRFTVSRDNSKNTLYLQMNSLRAEDTAVY |
| | | | YCAKHDYSNYPYFDYWGQGTLVTVSSGGGGSGGGGSGGGGSEIVLTQ |
| | | | SPATLSVSPGERATLSCRASQSVSSNLAWYQQKPGQAPRLLIYGSSS |
| | | | RATGIPDRFSGSGSGTDFTLTISRLEPEDFAVYYCQQYGSSPPPFGG |
| | | | GTKVEIK |
| 838. | CD70_16xCD- | bispecific | EVQLLESGGGLVQPGGSLRLSCAASGFTFSSYAMSWVRQSPGKGLEW |
| | scFc | molecule | VSAISGSGGRAQYAESVQGRFTVSRDNSKNTLYLQMNSLRAEDTAVY |
| | | | YCAKHDYSNYPYFDYWGQGTLVTVSSGGGGSGGGGSGGGGSEIVLTQ |
| | | | SPATLSVSPGERATLSCRASQSVSSNLAWYQQKPGQAPRLLIYGSSS |
| | | | RATGIPDRFSGSGSGTDFTLTISRLEPEDFAVYYCQQYGSSPPPFGG |
| | | | GTKVEIKSGGGGSEVQLVESGGGLVQPGGSLKLSCAASGFTFNKYAM |
| | | | NWVRQAPGKGLEWVARIRSKYNNYATYYADSVKDRFTISRDDSKNTA |
| | | | YLQMNNLKTEDTAVYYCVRHGNFGNSYISYWAYWGQGTLVTVSSGGG |
| | | | GSGGGGSGGGGSQTVVTQEPSLTVSPGGTVTLTCGSSTGAVTSGNYP |
| | | | NWVQQKPGQAPRGLIGGTKFLAPGTPARFSGSLLGGKAALTLSGVQP |
| | | | EDEAEYYCVLWYSNRWVFGGGTKLTVL |
| 839. | CD70_16xCD | bispecific | EVQLLESGGGLVQPGGSLRLSCAASGFTFSSYAMSWVRQSPGKGLEW |
| | 3-scFc | HLE | VSAISGSGGRAQYAESVQGRFTVSRDNSKNTLYLQMNSLRAEDTAVY |
| | | molecule | YCAKHDYSNYPYFDYWGQGTLVTVSSGGGGSGGGGSGGGGSEIVLTQ |
| | | | SPATLSVSPGERATLSCRASQSVSSNLAWYQQKPGQAPRLLIYGSSS |
| | | | RATGIPDRFSGSGSGTDFTLTISRLEPEDFAVYYCQQYGSSPPPFGG |
| | | | GTKVEIKSGGGGSEVQLVESGGGLVQPGGSLKLSCAASGFTFNKYAM |
| | | | NWVRQAPGKGLEWVARIRSKYNNYATYYADSVKDRFTISRDDSKNTA |
| | | | YLQMNNLKTEDTAVYYCVRHGNFGNSYISYWAYWGQGTLVTVSSGGG |
| | | | GSGGGGSGGGGSQTVVTQEPSLTVSPGGTVTLTCGSSTGAVTSGNYP |
| | | | NWVQQKPGQAPRGLIGGTKFLAPGTPARFSGSLLGGKAALTLSGVQP |
| | | | EDEAEYYCVLWYSNRWVFGGGTKLTVLGGGGDKTHTCPPCPAPELLG |
| | | | GPSVFLFPPKPKDTLMISRTPEVTCVVVDVSHEDPEVKFNWYVDGVE |
| | | | VHNAKTKPCEEQYGSTYRCVSVLTVLHQDWLNGKEYKCKVSNKALPA |
| | | | PIEKTISKAKGQPREPQVYTLPPSREEMTKNQVSLTCLVKGFYPSDI |
| | | | AVEWESNGQPENNYKTTPPVLDSDGSFFLYSKLTVDKSRWQQGNVFS |
| | | | CSVMHEALHNHYTQKSLSLSPGKGGGGSGGGGSGGGGSGGGGSGGGG |
| | | | SGGGGSDKTHTCPPCPAPELLGGPSVFLFPPKPKDTLMISRTPEVTC |
| | | | VVVDVSHEDPEVKFNWYVDGVEVHNAKTKPCEEQYGSTYRCVSVLTV |
| | | | LHQDWLNGKEYKCKVSNKALPAPIEKTISKAKGQPREPQVYTLPPSR |
| | | | EEMTKNQVSLTCLVKGFYPSDIAVEWESNGQPENNYKTTPPVLDSDG |
| | | | SFFLYSKLTVDKSRWQQGNVFSCSVMHEALHNHYTQKSLSLSPGK |
| 840. | CD70_17_CC | VH CDR1 | SYAMS |
| | xCD3-scFc | | |
| 841. | CD70_17_CC | VH CDR2 | AISGSGGRTFYAESVEG |
| | xCD3-scFc | | |
| 842. | CD70_17_CC | VH CDR3 | HDYSNYPYFDY |
| | xCD3-scFc | | |
| 843. | CD70_17_CC | VL CDR1 | RASQGVRSDYLA |
| | xCD3-scFc | | |
| 844. | CD70_17_CC | VL CDR2 | GASSRAT |
| | xCD3-scFc | | |
| 845. | CD70_17_CC | VL CDR3 | QQGSTPPT |
| | xCD3-scFc | | |
| 846. | CD70_17_CC | VH | EVQLLESGGGMVQPGGSLRLSCAASGFTFSSYAMSWVRQAPGKCLEW |
| | xCD3-scFc | | VSAISGSGGRTFYAESVEGRFTISRDNSKNTLYLQMNSLRAEDTAVY |
| | | | YCTKHDYSNYPYFDYWGQGTLVTVSS |
| 847. | CD70_17_CC | VL | EIVLTQSPGTLSLSPGERATLSCRASQGVRSDYLAWYQQKPGQAPRL |
| | xCD3-scFc | | LIYGASSRATGIPDRFSGSGSGTDFTLTISRLEPEDFAVYHCQQYGS |
| | | | TPPTFGCGTKVEIK |
| 848. | CD70_17_CC | scFv | EVQLLESGGGMVQPGGSLRLSCAASGFTFSSYAMSWVRQAPGKCLEW |
| | xCD3-scFc | | VSAISGSGGRTFYAESVEGRFTISRDNSKNTLYLQMNSLRAEDTAVY |
| | | | YCTKHDYSNYPYFDYWGQGTLVTVSSGGGGSGGGGSGGGGSEIVLTQ |
| | | | SPGTLSLSPGERATLSCRASQGVRSDYLAWYQQKPGQAPRLLIYGAS |
| | | | SRATGIPDRFSGSGSGTDFTLTISRLEPEDFAVYHCQQYGSTPPTFG |
| | | | CGTKVEIK |
| 849. | CD70_17_CC | bispecific | EVQLLESGGGMVQPGGSLRLSCAASGFTFSSYAMSWVRQAPGKCLEW |
| | xCD3-scFc | molecule | VSAISGSGGRTFYAESVEGRFTISRDNSKNTLYLQMNSLRAEDTAVY |
| | | | YCTKHDYSNYPYFDYWGQGTLVTVSSGGGGSGGGGSGGGGSEIVLTQ |
| | | | SPGTLSLSPGERATLSCRASQGVRSDYLAWYQQKPGQAPRLLIYGAS |
| | | | SRATGIPDRFSGSGSGTDFTLTISRLEPEDFAVYHCQQYGSTPPTFG |
| | | | CGTKVEIKSGGGGSEVQLVESGGGLVQPGGSLKLSCAASGFTFNKYA |
| | | | MNWVRQAPGKGLEWVARIRSKYNNYATYYADSVKDRFTISRDDSKNT |
| | | | AYLQMNNLKTEDTAVYYCVRHGNFGNSYISYWAYWGQGTLVTVSSGG |
| | | | GGSGGGGSGGGGSQTVVTQEPSLTVSPGGTVTLTCGSSTGAVTSGNY |
| | | | PNWVQQKPGQAPRGLIGGTKFLAPGTPARFSGSLLGGKAALTLSGVQ |
| | | | PEDEAEYYCVLWYSNRWVFGGGTKLTVL |
| 850. | CD70_17_CC | bispecific | EVQLLESGGGMVQPGGSLRLSCAASGFTFSSYAMSWVRQAPGKCLEW |
| | xCD3-scFc | HLE | VSAISGSGGRTFYAESVEGRFTISRDNSKNTLYLQMNSLRAEDTAVY |
| | | molecule | YCTKHDYSNYPYFDYWGQGTLVTVSSGGGGSGGGGSGGGGSEIVLTQ |
| | | | SPGTLSLSPGERATLSCRASQGVRSDYLAWYQQKPGQAPRLLIYGAS |
| | | | SRATGIPDRFSGSGSGTDFTLTISRLEPEDFAVYHCQQYGSTPPTFG |
| | | | CGTKVEIKSGGGGSEVQLVESGGGLVQPGGSLKLSCAASGFTFNKYA |
| | | | MNWVRQAPGKGLEWVARIRSKYNNYATYYADSVKDRFTISRDDSKNT |
| | | | AYLQMNNLKTEDTAVYYCVRHGNFGNSYISYWAYWGQGTLVTVSSGG |
| | | | GGSGGGGSGGGGSQTVVTQEPSLTVSPGGTVTLTCGSSTGAVTSGNY |
| | | | PNWVQQKPGQAPRGLIGGTKFLAPGTPARFSGSLLGGKAALTLSGVQ |
| | | | PEDEAEYYCVLWYSNRWVFGGGTKLTVLGGGGDKTHTCPPCPAPELL |
| | | | GGPSVFLFPPKPKDTLMISRTPEVTCVVVDVSHEDPEVKFNWYVDGV |
| | | | EVHNAKTKPCEEQYGSTYRCVSVLTVLHQDWLNGKEYKCKVSNKALP |
| | | | APIEKTISKAKGQPREPQVYTLPPSREEMTKNQVSLTCLVKGFYPSD |
| | | | IAVEWESNGQPENNYKTTPPVLDSDGSFFLYSKLTVDKSRWQQGNVF |
| | | | SCSVMHEALHNHYTQKSLSLSPGKGGGGSGGGGSGGGGSGGGGSGGG |
| | | | GSGGGGSDKTHTCPPCPAPELLGGPSVFLFPPKPKDTLMISRTPEVT |
| | | | CVVVDVSHEDPEVKFNWYVDGVEVHNAKTKPCEEQYGSTYRCVSVLT |
| | | | VLHQDWLNGKEYKCKVSNKALPAPIEKTISKAKGQPREPQVYTLPPS |
| | | | REEMTKNQVSLTCLVKGFYPSDIAVEWESNGQPENNYKTTPPVLDSD |
| | | | GSFFLYSKLTVDKSRWQQGNVFSCSVMHEALHNHYTQKSLSLSPGK |
| 851. | CD70_17xCD | VH | EVQLLESGGGMVQPGGSLRLSCAASGFTFSSYAMSWVRQAPGKGLEW |
| | 3-scFc | | VSAISGSGGRTFYAESVEGRFTISRDNSKNTLYLQMNSLRAEDTAVY |
| | | | YCTKHDYSNYPYFDYWGQGTLVTVSS |
| 852. | CD70_17xCD | VL | EIVLTQSPGTLSLSPGERATLSCRASQGVRSDYLAWYQQKPGQAPRL |
| | 3-scFc | | LIYGASSRATGIPDRFSGSGSGTDFTLTISRLEPEDFAVYHCQQYGS |
| | | | TPPTFGGGTKVEIK |
| 853. | CD70_17xCD | scFv | EVQLLESGGGMVQPGGSLRLSCAASGFTFSSYAMSWVRQAPGKGLEW |
| | 3-scFc | | VSAISGSGGRTFYAESVEGRFTISRDNSKNTLYLQMNSLRAEDTAVY |
| | | | YCTKHDYSNYPYFDYWGQGTLVTVSSGGGGSGGGGSGGGGSEIVLTQ |
| | | | SPGTLSLSPGERATLSCRASQGVRSDYLAWYQQKPGQAPRLLIYGAS |
| | | | SRATGIPDRFSGSGSGTDFTLTISRLEPEDFAVYHCQQYGSTPPTFG |
| | | | GGTKVEIK |
| 854. | CD70_17xCD | bispecific | EVQLLESGGGMVQPGGSLRLSCAASGFTFSSYAMSWVRQAPGKGLEW |
| | 3-scFc | molecule | VSAISGSGGRTFYAESVEGRFTISRDNSKNTLYLQMNSLRAEDTAVY |
| | | | YCTKHDYSNYPYFDYWGQGTLVTVSSGGGGSGGGGSGGGGSEIVLTQ |
| | | | SPGTLSLSPGERATLSCRASQGVRSDYLAWYQQKPGQAPRLLIYGAS |
| | | | SRATGIPDRFSGSGSGTDFTLTISRLEPEDFAVYHCQQYGSTPPTFG |
| | | | GGTKVEIKSGGGGSEVQLVESGGGLVQPGGSLKLSCAASGFTFNKYA |
| | | | MNWVRQAPGKGLEWVARIRSKYNNYATYYADSVKDRFTISRDDSKNT |
| | | | AYLQMNNLKTEDTAVYYCVRHGNFGNSYISYWAYWGQGTLVTVSSGG |
| | | | GGSGGGGSGGGGSQTVVTQEPSLTVSPGGTVTLTCGSSTGAVTSGNY |
| | | | PNWVQQKPGQAPRGLIGGTKFLAPGTPARFSGSLLGGKAALTLSGVQ |
| | | | PEDEAEYYCVLWYSNRWVFGGGTKLTVL |
| 855. | CD70_17xCD | bispecific | EVQLLESGGGMVQPGGSLRLSCAASGFTFSSYAMSWVRQAPGKGLEW |
| | 3-scFc | HLE | VSAISGSGGRTFYAESVEGRFTISRDNSKNTLYLQMNSLRAEDTAVY |
| | | molecule | YCTKHDYSNYPYFDYWGQGTLVTVSSGGGGSGGGGSGGGGSEIVLTQ |
| | | | SPGTLSLSPGERATLSCRASQGVRSDYLAWYQQKPGQAPRLLIYGAS |
| | | | SRATGIPDRFSGSGSGTDFTLTISRLEPEDFAVYHCQQYGSTPPTFG |
| | | | GGTKVEIKSGGGGSEVQLVESGGGLVQPGGSLKLSCAASGFTFNKYA |
| | | | MNWVRQAPGKGLEWVARIRSKYNNYATYYADSVKDRFTISRDDSKNT |
| | | | AYLQMNNLKTEDTAVYYCVRHGNFGNSYISYWAYWGQGTLVTVSSGG |
| | | | GGSGGGGSGGGGSQTVVTQEPSLTVSPGGTVTLTCGSSTGAVTSGNY |
| | | | PNWVQQKPGQAPRGLIGGTKFLAPGTPARFSGSLLGGKAALTLSGVQ |
| | | | PEDEAEYYCVLWYSNRWVFGGGTKLTVLGGGGDKTHTCPPCPAPELL |
| | | | GGPSVFLFPPKPKDTLMISRTPEVTCVVVDVSHEDPEVKFNWYVDGV |
| | | | EVHNAKTKPCEEQYGSTYRCVSVLTVLHQDWLNGKEYKCKVSNKALP |
| | | | APIEKTISKAKGQPREPQVYTLPPSREEMTKNQVSLTCLVKGFYPSD |
| | | | IAVEWESNGQPENNYKTTPPVLDSDGSFFLYSKLTVDKSRWQQGNVF |
| | | | SCSVMHEALHNHYTQKSLSLSPGKGGGGSGGGGSGGGGSGGGGSGGG |
| | | | GSGGGGSDKTHTCPPCPAPELLGGPSVFLFPPKPKDTLMISRTPEVT |
| | | | CVVVDVSHEDPEVKFNWYVDGVEVHNAKTKPCEEQYGSTYRCVSVLT |
| | | | VLHQDWLNGKEYKCKVSNKALPAPIEKTISKAKGQPREPQVYTLPPS |
| | | | REEMTKNQVSLTCLVKGFYPSDIAVEWESNGQPENNYKTTPPVLDSD |
| | | | GSFFLYSKLTVDKSRWQQGNVFSCSVMHEALHNHYTQKSLSLSPGK |
| 856. | CD70_18_CC | VH CDR1 | SYAMS |
| | xCD3-scFc | | |
| 857. | CD70_18_CC | VH CDR2 | AIGEGGGYTYYAESVKG |
| | xCD3-scFc | | |
| 858. | CD70_18_CC | VH CDR3 | HDYSNYPYFDY |
| | xCD3-scFc | | |
| 859. | CD70_18_CC | VL CDR1 | RASQGVRSSYFA |
| | xCD3-scFc | | |
| 860. | CD70_18_CC | VL CDR2 | GASTRAT |
| | xCD3-scFc | | |
| 861. | CD70_18_CC | VL CDR3 | QQYGSSPPT |
| | xCD3-scFc | | |
| 862. | CD70_18_CC | VH | EVQLLESGGGLVQPGGSLRLSCAASGFTFSSYAMSWVRQAPGKCLEW |
| | xCD3-scFc | | VSAIGEGGGYTYYAESVKGRFTISRDNSKNTLSLLMNSLRAEDTAVY |
| | | | YCARHDYSNYPYFDYWGQGTLVTVS |
| 863. | CD70_18_CC | VL | EIVLTQSPGTLSLSPGERATLSCRASQGVRSSYFAWYQQKPGQAPRL |
| | xCD3-scFc | | LIYGASTRATGIPARFSGSGSGTDFTLTISRLEPEDFAVYYCQQYGS |
| | | | SPPTFGCGTKVEIK |
| 864. | CD70_18_CC | scFv | EVQLLESGGGLVQPGGSLRLSCAASGFTFSSYAMSWVRQAPGKCLEW |
| | xCD3-scFc | | VSAIGEGGGYTYYAESVKGRFTISRDNSKNTLSLLMNSLRAEDTAVY |
| | | | YCARHDYSNYPYFDYWGQGTLVTVSSGGGGSGGGGSGGGGSEIVLTQ |
| | | | SPGTLSLSPGERATLSCRASQGVRSSYFAWYQQKPGQAPRLLIYGAS |
| | | | TRATGIPARFSGSGSGTDFTLTISRLEPEDFAVYYCQQYGSSPPTFG |
| | | | CGTKVEIK |
| 865. | CD70_18_CC | bispecific | EVQLLESGGGLVQPGGSLRLSCAASGFTFSSYAMSWVRQAPGKCLEW |
| | xCD3-scFc | molecule | VSAIGEGGGYTYYAESVKGRFTISRDNSKNTLSLLMNSLRAEDTAVY |
| | | | YCARHDYSNYPYFDYWGQGTLVTVSSGGGGSGGGGSGGGGSEIVLTQ |
| | | | SPGTLSLSPGERATLSCRASQGVRSSYFAWYQQKPGQAPRLLIYGAS |
| | | | TRATGIPARFSGSGSGTDFTLTISRLEPEDFAVYYCQQYGSSPPTFG |
| | | | CGTKVEIKSGGGGSEVQLVESGGGLVQPGGSLKLSCAASGFTFNKYA |
| | | | MNWVRQAPGKGLEWVARIRSKYNNYATYYADSVKDRFTISRDDSKNT |
| | | | AYLQMNNLKTEDTAVYYCVRHGNFGNSYISYWAYWGQGTLVTVSSGG |
| | | | GGSGGGGSGGGGSQTVVTQEPSLTVSPGGTVTLTCGSSTGAVTSGNY |
| | | | PNWVQQKPGQAPRGLIGGTKFLAPGTPARFSGSLLGGKAALTLSGVQ |
| | | | PEDEAEYYCVLWYSNRWVFGGGTKLTVL |
| 866. | CD70_18_CC | bispecific | EVQLLESGGGLVQPGGSLRLSCAASGFTFSSYAMSWVRQAPGKCLEW |
| | xCD3-scFc | HLE | VSAIGEGGGYTYYAESVKGRFTISRDNSKNTLSLLMNSLRAEDTAVY |
| | | molecule | YCARHDYSNYPYFDYWGQGTLVTVSSGGGGSGGGGSGGGGSEIVLTQ |
| | | | SPGTLSLSPGERATLSCRASQGVRSSYFAWYQQKPGQAPRLLIYGAS |
| | | | TRATGIPARFSGSGSGTDFTLTISRLEPEDFAVYYCQQYGSSPPTFG |
| | | | CGTKVEIKSGGGGSEVQLVESGGGLVQPGGSLKLSCAASGFTFNKYA |
| | | | MNWVRQAPGKGLEWVARIRSKYNNYATYYADSVKDRFTISRDDSKNT |
| | | | AYLQMNNLKTEDTAVYYCVRHGNFGNSYISYWAYWGQGTLVTVSSGG |
| | | | GGSGGGGSGGGGSQTVVTQEPSLTVSPGGTVTLTCGSSTGAVTSGNY |
| | | | PNWVQQKPGQAPRGLIGGTKFLAPGTPARFSGSLLGGKAALTLSGVQ |
| | | | PEDEAEYYCVLWYSNRWVFGGGTKLTVLGGGGDKTHTCPPCPAPELL |
| | | | GGPSVFLFPPKPKDTLMISRTPEVTCVVVDVSHEDPEVKFNWYVDGV |
| | | | EVHNAKTKPCEEQYGSTYRCVSVLTVLHQDWLNGKEYKCKVSNKALP |
| | | | APIEKTISKAKGQPREPQVYTLPPSREEMTKNQVSLTCLVKGFYPSD |
| | | | IAVEWESNGQPENNYKTTPPVLDSDGSFFLYSKLTVDKSRWQQGNVF |
| | | | SCSVMHEALHNHYTQKSLSLSPGKGGGGSGGGGSGGGGSGGGGSGGG |
| | | | GSGGGGSDKTHTCPPCPAPELLGGPSVFLFPPKPKDTLMISRTPEVT |
| | | | CVVVDVSHEDPEVKFNWYVDGVEVHNAKTKPCEEQYGSTYRCVSVLT |
| | | | VLHQDWLNGKEYKCKVSNKALPAPIEKTISKAKGQPREPQVYTLPPS |
| | | | REEMTKNQVSLTCLVKGFYPSDIAVEWESNGQPENNYKTTPPVLDSD |
| | | | GSFFLYSKLTVDKSRWQQGNVFSCSVMHEALHNHYTQKSLSLSPGK |
| 867. | CD70_18xCD | VH | EVQLLESGGGLVQPGGSLRLSCAASGFTFSSYAMSWVRQAPGKGLEW |
| | 3-scFc | | VSAIGEGGGYTYYAESVKGRFTISRDNSKNTLSLLMNSLRAEDTAVY |
| | | | YCARHDYSNYPYFDYWGQGTLVTVSS |
| 868. | CD70_18xCD | VL | EIVLTQSPGTLSLSPGERATLSCRASQGVRSSYFAWYQQKPGQAPRL |
| | 3-scFc | | LIYGASTRATGIPARFSGSGSGTDFTLTISRLEPEDFAVYYCQQYGS |
| | | | SPPTFGQGTKVEIK |
| 869. | CD70_18xCD | scFv | EVQLLESGGGLVQPGGSLRLSCAASGFTFSSYAMSWVRQAPGKGLEW |
| | 3-scFc | | VSAIGEGGGYTYYAESVKGRFTISRDNSKNTLSLLMNSLRAEDTAVY |
| | | | YCARHDYSNYPYFDYWGQGTLVTVSSGGGGSGGGGSGGGGSEIVLTQ |
| | | | SPGTLSLSPGERATLSCRASQGVRSSYFAWYQQKPGQAPRLLIYGAS |
| | | | TRATGIPARFSGSGSGTDFTLTISRLEPEDFAVYYCQQYGSSPPTFG |
| | | | QGTKVEIK |
| 870. | CD70_18xCD | bispecific | EVQLLESGGGLVQPGGSLRLSCAASGFTFSSYAMSWVRQAPGKGLEW |
| | 3-scFc | molecule | VSAIGEGGGYTYYAESVKGRFTISRDNSKNTLSLLMNSLRAEDTAVY |
| | | | YCARHDYSNYPYFDYWGQGTLVTVSSGGGGSGGGGSGGGGSEIVLTQ |
| | | | SPGTLSLSPGERATLSCRASQGVRSSYFAWYQQKPGQAPRLLIYGAS |
| | | | TRATGIPARFSGSGSGTDFTLTISRLEPEDFAVYYCQQYGSSPPTFG |
| | | | QGTKVEIKSGGGGSEVQLVESGGGLVQPGGSLKLSCAASGFTFNKYA |
| | | | MNWVRQAPGKGLEWVARIRSKYNNYATYYADSVKDRFTISRDDSKNT |
| | | | AYLQMNNLKTEDTAVYYCVRHGNFGNSYISYWAYWGQGTLVTVSSGG |
| | | | GGSGGGGSGGGGSQTVVTQEPSLTVSPGGTVTLTCGSSTGAVTSGNY |
| | | | PNWVQQKPGQAPRGLIGGTKFLAPGTPARFSGSLLGGKAALTLSGVQ |
| | | | PEDEAEYYCVLWYSNRWVFGGGTKLTVL |
| 871. | CD70_18xCD | bispecific | EVQLLESGGGLVQPGGSLRLSCAASGFTFSSYAMSWVRQAPGKGLEW |
| | 3-scFc | HLE | VSAIGEGGGYTYYAESVKGRFTISRDNSKNTLSLLMNSLRAEDTAVY |
| | | molecule | YCARHDYSNYPYFDYWGQGTLVTVSSGGGGSGGGGSGGGGSEIVLTQ |
| | | | SPGTLSLSPGERATLSCRASQGVRSSYFAWYQQKPGQAPRLLIYGAS |
| | | | TRATGIPARFSGSGSGTDFTLTISRLEPEDFAVYYCQQYGSSPPTFG |
| | | | QGTKVEIKSGGGGSEVQLVESGGGLVQPGGSLKLSCAASGFTFNKYA |
| | | | MNWVRQAPGKGLEWVARIRSKYNNYATYYADSVKDRFTISRDDSKNT |
| | | | AYLQMNNLKTEDTAVYYCVRHGNFGNSYISYWAYWGQGTLVTVSSGG |
| | | | GGSGGGGSGGGGSQTVVTQEPSLTVSPGGTVTLTCGSSTGAVTSGNY |
| | | | PNWVQQKPGQAPRGLIGGTKFLAPGTPARFSGSLLGGKAALTLSGVQ |
| | | | PEDEAEYYCVLWYSNRWVFGGGTKLTVLGGGGDKTHTCPPCPAPELL |
| | | | GGPSVFLFPPKPKDTLMISRTPEVTCVVVDVSHEDPEVKFNWYVDGV |
| | | | EVHNAKTKPCEEQYGSTYRCVSVLTVLHQDWLNGKEYKCKVSNKALP |
| | | | APIEKTISKAKGQPREPQVYTLPPSREEMTKNQVSLTCLVKGFYPSD |
| | | | IAVEWESNGQPENNYKTTPPVLDSDGSFFLYSKLTVDKSRWQQGNVF |
| | | | SCSVMHEALHNHYTQKSLSLSPGKGGGGSGGGGSGGGGSGGGGSGGG |
| | | | GSGGGGSDKTHTCPPCPAPELLGGPSVFLFPPKPKDTLMISRTPEVT |
| | | | CVVVDVSHEDPEVKFNWYVDGVEVHNAKTKPCEEQYGSTYRCVSVLT |
| | | | VLHQDWLNGKEYKCKVSNKALPAPIEKTISKAKGQPREPQVYTLPPS |
| | | | REEMTKNQVSLTCLVKGFYPSDIAVEWESNGQPENNYKTTPPVLDSD |
| | | | GSFFLYSKLTVDKSRWQQGNVFSCSVMHEALHNHYTQKSLSLSPGK |
| 872. | CD70_19_CC | VH CDR1 | SYAMS |
| | xCD3-scFc | | |
| 873. | CD70_19_CC | VH CDR2 | AISGSGGRTFYAESVEG |
| | xCD3-scFc | | |
| 874. | CD70_19_CC | VH CDR3 | HDYSNYPYFDY |
| | xCD3-scFc | | |
| 875. | CD70_19_CC | VL CDR1 | RASQSIRSNYLA |
| | xCD3-scFc | | |
| 876. | CD70_19_CC | VL CDR2 | GASSRAT |
| | xCD3-scFc | | |
| 877. | CD70_19_CC | VL CDR3 | QQYGSSPPS |
| | xCD3-scFc | | |
| 878. | CD70_19_CC | VH | EVQLLESGGGVVQPGRSLRLSCAASGFTFSSYAMSWVRQAPGKCLEW |
| | xCD3-scFc | | VSAISGSGGRTFYAESVEGRFTISRDNSKNTLYLQMNSLRAEDTAVY |
| | | | YCAKHDYSNYPYFDYWGQGTLVTVSS |
| 879. | CD70_19_CC | VL | EIVLTQSPGTLSLSPGERATLSCRASQSIRSNYLAWYQQKPGQAPRL |
| | xCD3-scFc | | LIYGASSRATGIPDRFSGSGSGTDFTLTISRLEPEDFAVYYCQQYGS |
| | | | SPPSFGCGTKVEIK |
| 880. | CD70_19_CC | scFv | EVQLLESGGGVVQPGRSLRLSCAASGFTFSSYAMSWVRQAPGKCLEW |
| | xCD3-scFc | | VSAISGSGGRTFYAESVEGRFTISRDNSKNTLYLQMNSLRAEDTAVY |
| | | | YCAKHDYSNYPYFDYWGQGTLVTVSSGGGGSGGGGSGGGGSEIVLTQ |
| | | | SPGTLSLSPGERATLSCRASQSIRSNYLAWYQQKPGQAPRLLIYGAS |
| | | | SRATGIPDRFSGSGSGTDFTLTISRLEPEDFAVYYCQQYGSSPPSFG |
| | | | CGTKVEIK |
| 881. | CD70_19_CC | bispecific | EVQLLESGGGVVQPGRSLRLSCAASGFTFSSYAMSWVRQAPGKCLEW |
| | xCD3-scFc | molecule | VSAISGSGGRTFYAESVEGRFTISRDNSKNTLYLQMNSLRAEDTAVY |
| | | | YCAKHDYSNYPYFDYWGQGTLVTVSSGGGGSGGGGSGGGGSEIVLTQ |
| | | | SPGTLSLSPGERATLSCRASQSIRSNYLAWYQQKPGQAPRLLIYGAS |
| | | | SRATGIPDRFSGSGSGTDFTLTISRLEPEDFAVYYCQQYGSSPPSFG |
| | | | CGTKVEIKSGGGGSEVQLVESGGGLVQPGGSLKLSCAASGFTFNKYA |
| | | | MNWVRQAPGKGLEWVARIRSKYNNYATYYADSVKDRFTISRDDSKNT |
| | | | AYLQMNNLKTEDTAVYYCVRHGNFGNSYISYWAYWGQGTLVTVSSGG |
| | | | GGSGGGGSGGGGSQTVVTQEPSLTVSPGGTVTLTCGSSTGAVTSGNY |
| | | | PNWVQQKPGQAPRGLIGGTKFLAPGTPARFSGSLLGGKAALTLSGVQ |
| | | | PEDEAEYYCVLWYSNRWVFGGGTKLTVL |
| 882. | CD70_19_CC | bispecific | EVQLLESGGGVVQPGRSLRLSCAASGFTFSSYAMSWVRQAPGKCLEW |
| | xCD3-scFc | HLE | VSAISGSGGRTFYAESVEGRFTISRDNSKNTLYLQMNSLRAEDTAVY |
| | | molecule | YCAKHDYSNYPYFDYWGQGTLVTVSSGGGGSGGGGSGGGGSEIVLTQ |
| | | | SPGTLSLSPGERATLSCRASQSIRSNYLAWYQQKPGQAPRLLIYGAS |
| | | | SRATGIPDRFSGSGSGTDFTLTISRLEPEDFAVYYCQQYGSSPPSFG |
| | | | CGTKVEIKSGGGGSEVQLVESGGGLVQPGGSLKLSCAASGFTFNKYA |
| | | | MNWVRQAPGKGLEWVARIRSKYNNYATYYADSVKDRFTISRDDSKNT |
| | | | AYLQMNNLKTEDTAVYYCVRHGNFGNSYISYWAYWGQGTLVTVSSGG |
| | | | GGSGGGGSGGGGSQTVVTQEPSLTVSPGGTVTLTCGSSTGAVTSGNY |
| | | | PNWVQQKPGQAPRGLIGGTKFLAPGTPARFSGSLLGGKAALTLSGVQ |
| | | | PEDEAEYYCVLWYSNRWVFGGGTKLTVLGGGGDKTHTCPPCPAPELL |
| | | | GGPSVFLFPPKPKDTLMISRTPEVTCVVVDVSHEDPEVKFNWYVDGV |
| | | | EVHNAKTKPCEEQYGSTYRCVSVLTVLHQDWLNGKEYKCKVSNKALP |
| | | | APIEKTISKAKGQPREPQVYTLPPSREEMTKNQVSLTCLVKGFYPSD |
| | | | IAVEWESNGQPENNYKTTPPVLDSDGSFFLYSKLTVDKSRWQQGNVF |
| | | | SCSVMHEALHNHYTQKSLSLSPGKGGGGSGGGGSGGGGSGGGGSGGG |
| | | | GSGGGGSDKTHTCPPCPAPELLGGPSVFLFPPKPKDTLMISRTPEVT |
| | | | CVVVDVSHEDPEVKFNWYVDGVEVHNAKTKPCEEQYGSTYRCVSVLT |
| | | | VLHQDWLNGKEYKCKVSNKALPAPIEKTISKAKGQPREPQVYTLPPS |
| | | | REEMTKNQVSLTCLVKGFYPSDIAVEWESNGQPENNYKTTPPVLDSD |
| | | | GSFFLYSKLTVDKSRWQQGNVFSCSVMHEALHNHYTQKSLSLSPGK |
| 883. | CD70_19xCD | VH | EVQLLESGGGVVQPGRSLRLSCAASGFTFSSYAMSWVRQAPGKGLEW |
| | 3-scFc | | VSAISGSGGRTFYAESVEGRFTISRDNSKNTLYLQMNSLRAEDTAVY |
| | | | YCAKHDYSNYPYFDYWGQGTLVTVSS |
| 884. | CD70_19xCD | VL | EIVLTQSPGTLSLSPGERATLSCRASQSIRSNYLAWYQQKPGQAPRL |
| | 3-scFc | | LIYGASSRATGIPDRFSGSGSGTDFTLTISRLEPEDFAVYYCQQYGS |
| | | | SPPSFGQGTKVEIK |
| 885. | CD70_19xCD | scFv | EVQLLESGGGVVQPGRSLRLSCAASGFTFSSYAMSWVRQAPGKGLEW |
| | 3-scFc | | VSAISGSGGRTFYAESVEGRFTISRDNSKNTLYLQMNSLRAEDTAVY |
| | | | YCAKHDYSNYPYFDYWGQGTLVTVSSGGGGSGGGGSGGGGSEIVLTQ |
| | | | SPGTLSLSPGERATLSCRASQSIRSNYLAWYQQKPGQAPRLLIYGAS |
| | | | SRATGIPDRFSGSGSGTDFTLTISRLEPEDFAVYYCQQYGSSPPSFG |
| | | | QGTKVEIK |
| 886. | CD70_19xCD | bispecific | EVQLLESGGGVVQPGRSLRLSCAASGFTFSSYAMSWVRQAPGKGLEW |
| | 3-scFc | molecule | VSAISGSGGRTFYAESVEGRFTISRDNSKNTLYLQMNSLRAEDTAVY |
| | | | YCAKHDYSNYPYFDYWGQGTLVTVSSGGGGSGGGGSGGGGSEIVLTQ |
| | | | SPGTLSLSPGERATLSCRASQSIRSNYLAWYQQKPGQAPRLLIYGAS |
| | | | SRATGIPDRFSGSGSGTDFTLTISRLEPEDFAVYYCQQYGSSPPSFG |
| | | | QGTKVEIKSGGGGSEVQLVESGGGLVQPGGSLKLSCAASGFTFNKYA |
| | | | MNWVRQAPGKGLEWVARIRSKYNNYATYYADSVKDRFTISRDDSKNT |
| | | | AYLQMNNLKTEDTAVYYCVRHGNFGNSYISYWAYWGQGTLVTVSSGG |
| | | | GGSGGGGSGGGGSQTVVTQEPSLTVSPGGTVTLTCGSSTGAVTSGNY |
| | | | PNWVQQKPGQAPRGLIGGTKFLAPGTPARFSGSLLGGKAALTLSGVQ |
| | | | PEDEAEYYCVLWYSNRWVFGGGTKLTVL |
| 887. | CD70_19xCD | bispecific | EVQLLESGGGVVQPGRSLRLSCAASGFTFSSYAMSWVRQAPGKGLEW |
| | 3-scFc | HLE | VSAISGSGGRTFYAESVEGRFTISRDNSKNTLYLQMNSLRAEDTAVY |
| | | molecule | YCAKHDYSNYPYFDYWGQGTLVTVSSGGGGSGGGGSGGGGSEIVLTQ |
| | | | SPGTLSLSPGERATLSCRASQSIRSNYLAWYQQKPGQAPRLLIYGAS |
| | | | SRATGIPDRFSGSGSGTDFTLTISRLEPEDFAVYYCQQYGSSPPSFG |
| | | | QGTKVEIKSGGGGSEVQLVESGGGLVQPGGSLKLSCAASGFTFNKYA |
| | | | MNWVRQAPGKGLEWVARIRSKYNNYATYYADSVKDRFTISRDDSKNT |
| | | | AYLQMNNLKTEDTAVYYCVRHGNFGNSYISYWAYWGQGTLVTVSSGG |
| | | | GGSGGGGSGGGGSQTVVTQEPSLTVSPGGTVTLTCGSSTGAVTSGNY |
| | | | PNWVQQKPGQAPRGLIGGTKFLAPGTPARFSGSLLGGKAALTLSGVQ |
| | | | PEDEAEYYCVLWYSNRWVFGGGTKLTVLGGGGDKTHTCPPCPAPELL |
| | | | GGPSVFLFPPKPKDTLMISRTPEVTCVVVDVSHEDPEVKFNWYVDGV |
| | | | EVHNAKTKPCEEQYGSTYRCVSVLTVLHQDWLNGKEYKCKVSNKALP |
| | | | APIEKTISKAKGQPREPQVYTLPPSREEMTKNQVSLTCLVKGFYPSD |
| | | | IAVEWESNGQPENNYKTTPPVLDSDGSFFLYSKLTVDKSRWQQGNVF |
| | | | SCSVMHEALHNHYTQKSLSLSPGKGGGGSGGGGSGGGGSGGGGSGGG |
| | | | GSGGGGSDKTHTCPPCPAPELLGGPSVFLFPPKPKDTLMISRTPEVT |
| | | | CVVVDVSHEDPEVKFNWYVDGVEVHNAKTKPCEEQYGSTYRCVSVLT |
| | | | VLHQDWLNGKEYKCKVSNKALPAPIEKTISKAKGQPREPQVYTLPPS |
| | | | REEMTKNQVSLTCLVKGFYPSDIAVEWESNGQPENNYKTTPPVLDSD |
| | | | GSFFLYSKLTVDKSRWQQGNVFSCSVMHEALHNHYTQKSLSLSPGK |
| 888. | CD70_20_CC | VH CDR1 | SYAMS |
| | xCD3-scFc | | |
| 889. | CD70_20_CC | VH CDR2 | AISGSGGGTFYAESVEG |
| | xCD3-scFc | | |
| 890. | CD70_20_CC | VH CDR3 | HDYSNYPYFDY |
| | xCD3-scFc | | |
| 891. | CD70_20_CC | VL CDR1 | RASQSVRSSYLA |
| | xCD3-scFc | | |
| 892. | CD70_20_CC | VL CDR2 | GASSRAT |
| | xCD3-scFc | | |
| 893. | CD70_20_CC | VL CDR3 | QQYGDLPFT |
| | xCD3-scFc | | |
| 894. | CD70_20_CC | VH | EVQLLESGGGVVQPGRSLRLSCAASGFTFSSYAMSWVRQAPGKCLEW |
| | xCD3-scFc | | VSAISGSGGGTFYAESVEGRFTISRDNSKNTLYLQMNSLRAEDTAVY |
| | | | YCARHDYSNYPYFDYWGLGTLVTVSS |
| 895. | CD70_20_CC | VL | EIVLTQSPGTLSLSPGERATLSCRASQSVRSSYLAWYQQKPGQAPRL |
| | xCD3-scFc | | LIYGASSRATGIPDRFSGSGSGTDFTLTISRLEPEDFAVYSCQQYGD |
| | | | LPFTFGCGTKVEIK |
| 896. | CD70_20_CC | scFv | EVQLLESGGGVVQPGRSLRLSCAASGFTFSSYAMSWVRQAPGKCLEW |
| | xCD3-scFc | | VSAISGSGGGTFYAESVEGRFTISRDNSKNTLYLQMNSLRAEDTAVY |
| | | | YCARHDYSNYPYFDYWGLGTLVTVSSGGGGSGGGGSGGGGSEIVLTQ |
| | | | SPGTLSLSPGERATLSCRASQSVRSSYLAWYQQKPGQAPRLLIYGAS |
| | | | SRATGIPDRFSGSGSGTDFTLTISRLEPEDFAVYSCQQYGDLPFTFG |
| | | | CGTKVEIK |
| 897. | CD70_20_CC | bispecific | EVQLLESGGGVVQPGRSLRLSCAASGFTFSSYAMSWVRQAPGKCLEW |
| | xCD3-scFc | molecule | VSAISGSGGGTFYAESVEGRFTISRDNSKNTLYLQMNSLRAEDTAVY |
| | | | YCARHDYSNYPYFDYWGLGTLVTVSSGGGGSGGGGSGGGGSEIVLTQ |
| | | | SPGTLSLSPGERATLSCRASQSVRSSYLAWYQQKPGQAPRLLIYGAS |
| | | | SRATGIPDRFSGSGSGTDFTLTISRLEPEDFAVYSCQQYGDLPFTFG |
| | | | CGTKVEIKSGGGGSEVQLVESGGGLVQPGGSLKLSCAASGFTFNKYA |
| | | | MNWVRQAPGKGLEWVARIRSKYNNYATYYADSVKDRFTISRDDSKNT |
| | | | AYLQMNNLKTEDTAVYYCVRHGNFGNSYISYWAYWGQGTLVTVSSGG |
| | | | GGSGGGGSGGGGSQTVVTQEPSLTVSPGGTVTLTCGSSTGAVTSGNY |
| | | | PNWVQQKPGQAPRGLIGGTKFLAPGTPARFSGSLLGGKAALTLSGVQ |
| | | | PEDEAEYYCVLWYSNRWVFGGGTKLTVL |
| 898. | CD70_20_CC | bispecific | EVQLLESGGGVVQPGRSLRLSCAASGFTFSSYAMSWVRQAPGKCLEW |
| | xCD3-scFc | HLE | VSAISGSGGGTFYAESVEGRFTISRDNSKNTLYLQMNSLRAEDTAVY |
| | | molecule | YCARHDYSNYPYFDYWGLGTLVTVSSGGGGSGGGGSGGGGSEIVLTQ |
| | | | SPGTLSLSPGERATLSCRASQSVRSSYLAWYQQKPGQAPRLLIYGAS |
| | | | SRATGIPDRFSGSGSGTDFTLTISRLEPEDFAVYSCQQYGDLPFTFG |
| | | | CGTKVEIKSGGGGSEVQLVESGGGLVQPGGSLKLSCAASGFTFNKYA |
| | | | MNWVRQAPGKGLEWVARIRSKYNNYATYYADSVKDRFTISRDDSKNT |
| | | | AYLQMNNLKTEDTAVYYCVRHGNFGNSYISYWAYWGQGTLVTVSSGG |
| | | | GGSGGGGSGGGGSQTVVTQEPSLTVSPGGTVTLTCGSSTGAVTSGNY |
| | | | PNWVQQKPGQAPRGLIGGTKFLAPGTPARFSGSLLGGKAALTLSGVQ |
| | | | PEDEAEYYCVLWYSNRWVFGGGTKLTVLGGGGDKTHTCPPCPAPELL |
| | | | GGPSVFLFPPKPKDTLMISRTPEVTCVVVDVSHEDPEVKFNWYVDGV |
| | | | EVHNAKTKPCEEQYGSTYRCVSVLTVLHQDWLNGKEYKCKVSNKALP |
| | | | APIEKTISKAKGQPREPQVYTLPPSREEMTKNQVSLTCLVKGFYPSD |
| | | | IAVEWESNGQPENNYKTTPPVLDSDGSFFLYSKLTVDKSRWQQGNVF |
| | | | SCSVMHEALHNHYTQKSLSLSPGKGGGGSGGGGSGGGGSGGGGSGGG |
| | | | GSGGGGSDKTHTCPPCPAPELLGGPSVFLFPPKPKDTLMISRTPEVT |
| | | | CVVVDVSHEDPEVKFNWYVDGVEVHNAKTKPCEEQYGSTYRCVSVLT |
| | | | VLHQDWLNGKEYKCKVSNKALPAPIEKTISKAKGQPREPQVYTLPPS |
| | | | REEMTKNQVSLTCLVKGFYPSDIAVEWESNGQPENNYKTTPPVLDSD |
| | | | GSFFLYSKLTVDKSRWQQGNVFSCSVMHEALHNHYTQKSLSLSPGK |
| 899. | CD70_20xCD | VH | EVQLLESGGGVVQPGRSLRLSCAASGFTFSSYAMSWVRQAPGKGLEW |
| | 3-scFc | | VSAISGSGGGTFYAESVEGRFTISRDNSKNTLYLQMNSLRAEDTAVY |
| | | | YCARHDYSNYPYFDYWGLGTLVTVSS |
| 900. | CD70_20xCD | VL | EIVLTQSPGTLSLSPGERATLSCRASQSVRSSYLAWYQQKPGQAPRL |
| | 3-scFc | | LIYGASSRATGIPDRFSGSGSGTDFTLTISRLEPEDFAVYSCQQYGD |
| | | | LPFTFGPGTKVEIK |
| 901. | CD70_20xCD | scFv | EVQLLESGGGVVQPGRSLRLSCAASGFTFSSYAMSWVRQAPGKGLEW |
| | 3-scFc | | VSAISGSGGGTFYAESVEGRFTISRDNSKNTLYLQMNSLRAEDTAVY |
| | | | YCARHDYSNYPYFDYWGLGTLVTVSSGGGGSGGGGSGGGGSEIVLTQ |
| | | | SPGTLSLSPGERATLSCRASQSVRSSYLAWYQQKPGQAPRLLIYGAS |
| | | | SRATGIPDRFSGSGSGTDFTLTISRLEPEDFAVYSCQQYGDLPFTFG |
| | | | PGTKVEIK |
| 902. | CD70_20xCD | bispecific | EVQLLESGGGVVQPGRSLRLSCAASGFTFSSYAMSWVRQAPGKGLEW |
| | 3-scFc | molecule | VSAISGSGGGTFYAESVEGRFTISRDNSKNTLYLQMNSLRAEDTAVY |
| | | | YCARHDYSNYPYFDYWGLGTLVTVSSGGGGSGGGGSGGGGSEIVLTQ |
| | | | SPGTLSLSPGERATLSCRASQSVRSSYLAWYQQKPGQAPRLLIYGAS |
| | | | SRATGIPDRFSGSGSGTDFTLTISRLEPEDFAVYSCQQYGDLPFTFG |
| | | | PGTKVEIKSGGGGSEVQLVESGGGLVQPGGSLKLSCAASGFTFNKYA |
| | | | MNWVRQAPGKGLEWVARIRSKYNNYATYYADSVKDRFTISRDDSKNT |
| | | | AYLQMNNLKTEDTAVYYCVRHGNFGNSYISYWAYWGQGTLVTVSSGG |
| | | | GGSGGGGSGGGGSQTVVTQEPSLTVSPGGTVTLTCGSSTGAVTSGNY |
| | | | PNWVQQKPGQAPRGLIGGTKFLAPGTPARFSGSLLGGKAALTLSGVQ |
| | | | PEDEAEYYCVLWYSNRWVFGGGTKLTVL |
| 903. | CD70_20xCD | bispecific | EVQLLESGGGVVQPGRSLRLSCAASGFTFSSYAMSWVRQAPGKGLEW |
| | 3-scFc | HLE | VSAISGSGGGTFYAESVEGRFTISRDNSKNTLYLQMNSLRAEDTAVY |
| | | molecule | YCARHDYSNYPYFDYWGLGTLVTVSSGGGGSGGGGSGGGGSEIVLTQ |
| | | | SPGTLSLSPGERATLSCRASQSVRSSYLAWYQQKPGQAPRLLIYGAS |
| | | | SRATGIPDRFSGSGSGTDFTLTISRLEPEDFAVYSCQQYGDLPFTFG |
| | | | PGTKVEIKSGGGGSEVQLVESGGGLVQPGGSLKLSCAASGFTFNKYA |
| | | | MNWVRQAPGKGLEWVARIRSKYNNYATYYADSVKDRFTISRDDSKNT |
| | | | AYLQMNNLKTEDTAVYYCVRHGNFGNSYISYWAYWGQGTLVTVSSGG |
| | | | GGSGGGGSGGGGSQTVVTQEPSLTVSPGGTVTLTCGSSTGAVTSGNY |
| | | | PNWVQQKPGQAPRGLIGGTKFLAPGTPARFSGSLLGGKAALTLSGVQ |
| | | | PEDEAEYYCVLWYSNRWVFGGGTKLTVLGGGGDKTHTCPPCPAPELL |
| | | | GGPSVFLFPPKPKDTLMISRTPEVTCVVVDVSHEDPEVKFNWYVDGV |
| | | | EVHNAKTKPCEEQYGSTYRCVSVLTVLHQDWLNGKEYKCKVSNKALP |
| | | | APIEKTISKAKGQPREPQVYTLPPSREEMTKNQVSLTCLVKGFYPSD |
| | | | IAVEWESNGQPENNYKTTPPVLDSDGSFFLYSKLTVDKSRWQQGNVF |
| | | | SCSVMHEALHNHYTQKSLSLSPGKGGGGSGGGGSGGGGSGGGGSGGG |
| | | | GSGGGGSDKTHTCPPCPAPELLGGPSVFLFPPKPKDTLMISRTPEVT |
| | | | CVVVDVSHEDPEVKFNWYVDGVEVHNAKTKPCEEQYGSTYRCVSVLT |
| | | | VLHQDWLNGKEYKCKVSNKALPAPIEKTISKAKGQPREPQVYTLPPS |
| | | | REEMTKNQVSLTCLVKGFYPSDIAVEWESNGQPENNYKTTPPVLDSD |
| | | | GSFFLYSKLTVDKSRWQQGNVFSCSVMHEALHNHYTQKSLSLSPGK |
| 904. | CD70_21_CC | VH CDR1 | SYAMS |
| | xCD3-scFc | | |
| 905. | CD70_21_CC | VH CDR2 | AISGSGGRTFYAESVEG |
| | xCD3-scFc | | |
| 906. | CD70_21_CC | VH CDR3 | HDYSNYPYFDY |
| | xCD3-scFc | | |
| 907. | CD70_21_CC | VL CDR1 | RASQSVRSSYLA |
| | xCD3-scFc | | |
| 908. | CD70_21_CC | VL CDR2 | GASSRAT |
| | xCD3-scFc | | |
| 909. | CD70_21_CC | VL CDR3 | QQYGDLPFT |
| | xCD3-scFc | | |
| 910. | CD70_21_CC | VH | EVQLLESGGGMVQPGGSLRLSCAASGFTFSSYAMSWVRQAPGKCLEW |
| | xCD3-scFc | | VSAISGSGGRTFYAESVEGRFTISRDNSKNTLYLQMNSLRAEDTAVY |
| | | | YCTKHDYSNYPYFDYWGQGTLVTVSS |
| 911. | CD70_21_CC | VL | EIVLTQSPGTLSLSPGERATLSCRASQSVRSSYLAWYQQKPGQAPRL |
| | xCD3-scFc | | LIYGASSRATGIPDRFSGSGSGTDFTLTISRLEPEDFAVYYCQQYGD |
| | | | LPFTFGCGTKVDIK |
| 912. | CD70_21_CC | scFv | EVQLLESGGGMVQPGGSLRLSCAASGFTFSSYAMSWVRQAPGKCLEW |
| | xCD3-scFc | | VSAISGSGGRTFYAESVEGRFTISRDNSKNTLYLQMNSLRAEDTAVY |
| | | | YCTKHDYSNYPYFDYWGQGTLVTVSSGGGGSGGGGSGGGGSEIVLTQ |
| | | | SPGTLSLSPGERATLSCRASQSVRSSYLAWYQQKPGQAPRLLIYGAS |
| | | | SRATGIPDRFSGSGSGTDFTLTISRLEPEDFAVYYCQQYGDLPFTFG |
| | | | CGTKVDIK |
| 913. | CD70_21_CC | bispecific | EVQLLESGGGMVQPGGSLRLSCAASGFTFSSYAMSWVRQAPGKCLEW |
| | xCD3-scFc | molecule | VSAISGSGGRTFYAESVEGRFTISRDNSKNTLYLQMNSLRAEDTAVY |
| | | | YCTKHDYSNYPYFDYWGQGTLVTVSSGGGGSGGGGSGGGGSEIVLTQ |
| | | | SPGTLSLSPGERATLSCRASQSVRSSYLAWYQQKPGQAPRLLIYGAS |
| | | | SRATGIPDRFSGSGSGTDFTLTISRLEPEDFAVYYCQQYGDLPFTFG |
| | | | CGTKVDIKSGGGGSEVQLVESGGGLVQPGGSLKLSCAASGFTFNKYA |
| | | | MNWVRQAPGKGLEWVARIRSKYNNYATYYADSVKDRFTISRDDSKNT |
| | | | AYLQMNNLKTEDTAVYYCVRHGNFGNSYISYWAYWGQGTLVTVSSGG |
| | | | GGSGGGGSGGGGSQTVVTQEPSLTVSPGGTVTLTCGSSTGAVTSGNY |
| | | | PNWVQQKPGQAPRGLIGGTKFLAPGTPARFSGSLLGGKAALTLSGVQ |
| | | | PEDEAEYYCVLWYSNRWVFGGGTKLTVL |
| 914. | CD70_21_CC | bispecific | EVQLLESGGGMVQPGGSLRLSCAASGFTFSSYAMSWVRQAPGKCLEW |
| | xCD3-scFc | HLE | VSAISGSGGRTFYAESVEGRFTISRDNSKNTLYLQMNSLRAEDTAVY |
| | | molecule | YCTKHDYSNYPYFDYWGQGTLVTVSSGGGGSGGGGSGGGGSEIVLTQ |
| | | | SPGTLSLSPGERATLSCRASQSVRSSYLAWYQQKPGQAPRLLIYGAS |
| | | | SRATGIPDRFSGSGSGTDFTLTISRLEPEDFAVYYCQQYGDLPFTFG |
| | | | CGTKVDIKSGGGGSEVQLVESGGGLVQPGGSLKLSCAASGFTFNKYA |
| | | | MNWVRQAPGKGLEWVARIRSKYNNYATYYADSVKDRFTISRDDSKNT |
| | | | AYLQMNNLKTEDTAVYYCVRHGNFGNSYISYWAYWGQGTLVTVSSGG |
| | | | GGSGGGGSGGGGSQTVVTQEPSLTVSPGGTVTLTCGSSTGAVTSGNY |
| | | | PNWVQQKPGQAPRGLIGGTKFLAPGTPARFSGSLLGGKAALTLSGVQ |
| | | | PEDEAEYYCVLWYSNRWVFGGGTKLTVLGGGGDKTHTCPPCPAPELL |
| | | | GGPSVFLFPPKPKDTLMISRTPEVTCVVVDVSHEDPEVKFNWYVDGV |
| | | | EVHNAKTKPCEEQYGSTYRCVSVLTVLHQDWLNGKEYKCKVSNKALP |
| | | | APIEKTISKAKGQPREPQVYTLPPSREEMTKNQVSLTCLVKGFYPSD |
| | | | IAVEWESNGQPENNYKTTPPVLDSDGSFFLYSKLTVDKSRWQQGNVF |
| | | | SCSVMHEALHNHYTQKSLSLSPGKGGGGSGGGGSGGGGSGGGGSGGG |
| | | | GSGGGGSDKTHTCPPCPAPELLGGPSVFLFPPKPKDTLMISRTPEVT |
| | | | CVVVDVSHEDPEVKFNWYVDGVEVHNAKTKPCEEQYGSTYRCVSVLT |
| | | | VLHQDWLNGKEYKCKVSNKALPAPIEKTISKAKGQPREPQVYTLPPS |
| | | | REEMTKNQVSLTCLVKGFYPSDIAVEWESNGQPENNYKTTPPVLDSD |
| | | | GSFFLYSKLTVDKSRWQQGNVFSCSVMHEALHNHYTQKSLSLSPGK |
| 915. | CD70_21xCD | VH | EVQLLESGGGMVQPGGSLRLSCAASGFTFSSYAMSWVRQAPGKGLEW |
| | 3-scFc | | VSAISGSGGRTFYAESVEGRFTISRDNSKNTLYLQMNSLRAEDTAVY |
| | | | YCTKHDYSNYPYFDYWGQGTLVTVSS |
| 916. | CD70_21xCD | VL | EIVLTQSPGTLSLSPGERATLSCRASQSVRSSYLAWYQQKPGQAPRL |
| | 3-scFc | | LIYGASSRATGIPDRFSGSGSGTDFTLTISRLEPEDFAVYYCQQYGD |
| | | | LPFTFGPGTKVDIK |
| 917. | CD70_21xCD | scFv | EVQLLESGGGMVQPGGSLRLSCAASGFTFSSYAMSWVRQAPGKGLEW |
| | 3-scFc | | VSAISGSGGRTFYAESVEGRFTISRDNSKNTLYLQMNSLRAEDTAVY |
| | | | YCTKHDYSNYPYFDYWGQGTLVTVSSGGGGSGGGGSGGGGSEIVLTQ |
| | | | SPGTLSLSPGERATLSCRASQSVRSSYLAWYQQKPGQAPRLLIYGAS |
| | | | SRATGIPDRFSGSGSGTDFTLTISRLEPEDFAVYYCQQYGDLPFTFG |
| | | | PGTKVDIK |
| 918. | CD70_21xCD | bispecific | EVQLLESGGGMVQPGGSLRLSCAASGFTFSSYAMSWVRQAPGKGLEW |
| | 3-scFc | molecule | VSAISGSGGRTFYAESVEGRFTISRDNSKNTLYLQMNSLRAEDTAVY |
| | | | YCTKHDYSNYPYFDYWGQGTLVTVSSGGGGSGGGGSGGGGSEIVLTQ |
| | | | SPGTLSLSPGERATLSCRASQSVRSSYLAWYQQKPGQAPRLLIYGAS |
| | | | SRATGIPDRFSGSGSGTDFTLTISRLEPEDFAVYYCQQYGDLPFTFG |
| | | | PGTKVDIKSGGGGSEVQLVESGGGLVQPGGSLKLSCAASGFTFNKYA |
| | | | MNWVRQAPGKGLEWVARIRSKYNNYATYYADSVKDRFTISRDDSKNT |
| | | | AYLQMNNLKTEDTAVYYCVRHGNFGNSYISYWAYWGQGTLVTVSSGG |
| | | | GGSGGGGSGGGGSQTVVTQEPSLTVSPGGTVTLTCGSSTGAVTSGNY |
| | | | PNWVQQKPGQAPRGLIGGTKFLAPGTPARFSGSLLGGKAALTLSGVQ |
| | | | PEDEAEYYCVLWYSNRWVFGGGTKLTVL |
| 919. | CD70_21xCD | bispecific | EVQLLESGGGMVQPGGSLRLSCAASGFTFSSYAMSWVRQAPGKGLEW |
| | 3-scFc | HLE | VSAISGSGGRTFYAESVEGRFTISRDNSKNTLYLQMNSLRAEDTAVY |
| | | molecule | YCTKHDYSNYPYFDYWGQGTLVTVSSGGGGSGGGGSGGGGSEIVLTQ |
| | | | SPGTLSLSPGERATLSCRASQSVRSSYLAWYQQKPGQAPRLLIYGAS |
| | | | SRATGIPDRFSGSGSGTDFTLTISRLEPEDFAVYYCQQYGDLPFTFG |
| | | | PGTKVDIKSGGGGSEVQLVESGGGLVQPGGSLKLSCAASGFTFNKYA |
| | | | MNWVRQAPGKGLEWVARIRSKYNNYATYYADSVKDRFTISRDDSKNT |
| | | | AYLQMNNLKTEDTAVYYCVRHGNFGNSYISYWAYWGQGTLVTVSSGG |
| | | | GGSGGGGSGGGGSQTVVTQEPSLTVSPGGTVTLTCGSSTGAVTSGNY |
| | | | PNWVQQKPGQAPRGLIGGTKFLAPGTPARFSGSLLGGKAALTLSGVQ |
| | | | PEDEAEYYCVLWYSNRWVFGGGTKLTVLGGGGDKTHTCPPCPAPELL |
| | | | GGPSVFLFPPKPKDTLMISRTPEVTCVVVDVSHEDPEVKFNWYVDGV |
| | | | EVHNAKTKPCEEQYGSTYRCVSVLTVLHQDWLNGKEYKCKVSNKALP |
| | | | APIEKTISKAKGQPREPQVYTLPPSREEMTKNQVSLTCLVKGFYPSD |
| | | | IAVEWESNGQPENNYKTTPPVLDSDGSFFLYSKLTVDKSRWQQGNVF |
| | | | SCSVMHEALHNHYTQKSLSLSPGKGGGGSGGGGSGGGGSGGGGSGGG |
| | | | GSGGGGSDKTHTCPPCPAPELLGGPSVFLFPPKPKDTLMISRTPEVT |
| | | | CVVVDVSHEDPEVKFNWYVDGVEVHNAKTKPCEEQYGSTYRCVSVLT |
| | | | VLHQDWLNGKEYKCKVSNKALPAPIEKTISKAKGQPREPQVYTLPPS |
| | | | REEMTKNQVSLTCLVKGFYPSDIAVEWESNGQPENNYKTTPPVLDSD |
| | | | GSFFLYSKLTVDKSRWQQGNVFSCSVMHEALHNHYTQKSLSLSPGK |
| 920. | CD70_22_CC | VH CDR1 | TYAMS |
| | xCD3-scFc | | |
| 921. | CD70_22_CC | VH CDR2 | LISGSGGRTYYAESVKG |
| | xCD3-scFc | | |
| 922. | CD70_22_CC | VH CDR3 | HDYSNYPYFDY |
| | xCD3-scFc | | |
| 923. | CD70_22_CC | VL CDR1 | RASQGVRSSYLA |
| | xCD3-scFc | | |
| 924. | CD70_22_CC | VL CDR2 | GASSRAT |
| | xCD3-scFc | | |
| 925. | CD70_22_CC | VL CDR3 | QQYGSSPPT |
| | xCD3-scFc | | |
| 926. | CD70_22_CC | VH | EVQLLESGGGLVQPGGSLRLSCAASGFTFSTYAMSWVRQAPGKCLEW |
| | xCD3-scFc | | VSLISGSGGRTYYAESVKGRFTISRDNSKNTLYLQMNSLRAEDTAVY |
| | | | YCAKHDYSNYPYFDYWGQGTLVTVSS |
| 927. | CD70_22_CC | VL | EIVLTQSPGTLSLSPGERATLSCRASQGVRSSYLAWYQQKPGQAPRL |
| | xCD3-scFc | | LIYGASSRATGIPDRFSGSGSGTDFTLTINRLEPEDFAVYYCQQYGS |
| | | | SPPTFGCGTKVDIK |
| 928. | CD70_22_CC | scFv | EVQLLESGGGLVQPGGSLRLSCAASGFTFSTYAMSWVRQAPGKCLEW |
| | xCD3-scFc | | VSLISGSGGRTYYAESVKGRFTISRDNSKNTLYLQMNSLRAEDTAVY |
| | | | YCAKHDYSNYPYFDYWGQGTLVTVSSGGGGSGGGGSGGGGSEIVLTQ |
| | | | SPGTLSLSPGERATLSCRASQGVRSSYLAWYQQKPGQAPRLLIYGAS |
| | | | SRATGIPDRFSGSGSGTDFTLTINRLEPEDFAVYYCQQYGSSPPTFG |
| | | | CGTKVDIK |
| 929. | CD70_22_CC | bispecific | EVQLLESGGGLVQPGGSLRLSCAASGFTFSTYAMSWVRQAPGKCLEW |
| | xCD3-scFc | molecule | VSLISGSGGRTYYAESVKGRFTISRDNSKNTLYLQMNSLRAEDTAVY |
| | | | YCAKHDYSNYPYFDYWGQGTLVTVSSGGGGSGGGGSGGGGSEIVLTQ |
| | | | SPGTLSLSPGERATLSCRASQGVRSSYLAWYQQKPGQAPRLLIYGAS |
| | | | SRATGIPDRFSGSGSGTDFTLTINRLEPEDFAVYYCQQYGSSPPTFG |
| | | | CGTKVDIKSGGGGSEVQLVESGGGLVQPGGSLKLSCAASGFTFNKYA |
| | | | MNWVRQAPGKGLEWVARIRSKYNNYATYYADSVKDRFTISRDDSKNT |
| | | | AYLQMNNLKTEDTAVYYCVRHGNFGNSYISYWAYWGQGTLVTVSSGG |
| | | | GGSGGGGSGGGGSQTVVTQEPSLTVSPGGTVTLTCGSSTGAVTSGNY |
| | | | PNWVQQKPGQAPRGLIGGTKFLAPGTPARFSGSLLGGKAALTLSGVQ |
| | | | PEDEAEYYCVLWYSNRWVFGGGTKLTVL |
| 930. | CD70_22_CC | bispecific | EVQLLESGGGLVQPGGSLRLSCAASGFTFSTYAMSWVRQAPGKCLEW |
| | xCD3-scFc | HLE | VSLISGSGGRTYYAESVKGRFTISRDNSKNTLYLQMNSLRAEDTAVY |
| | | molecule | YCAKHDYSNYPYFDYWGQGTLVTVSSGGGGSGGGGSGGGGSEIVLTQ |
| | | | SPGTLSLSPGERATLSCRASQGVRSSYLAWYQQKPGQAPRLLIYGAS |
| | | | SRATGIPDRFSGSGSGTDFTLTINRLEPEDFAVYYCQQYGSSPPTFG |
| | | | CGTKVDIKSGGGGSEVQLVESGGGLVQPGGSLKLSCAASGFTFNKYA |
| | | | MNWVRQAPGKGLEWVARIRSKYNNYATYYADSVKDRFTISRDDSKNT |
| | | | AYLQMNNLKTEDTAVYYCVRHGNFGNSYISYWAYWGQGTLVTVSSGG |
| | | | GGSGGGGSGGGGSQTVVTQEPSLTVSPGGTVTLTCGSSTGAVTSGNY |
| | | | PNWVQQKPGQAPRGLIGGTKFLAPGTPARFSGSLLGGKAALTLSGVQ |
| | | | PEDEAEYYCVLWYSNRWVFGGGTKLTVLGGGGDKTHTCPPCPAPELL |
| | | | GGPSVFLFPPKPKDTLMISRTPEVTCVVVDVSHEDPEVKFNWYVDGV |
| | | | EVHNAKTKPCEEQYGSTYRCVSVLTVLHQDWLNGKEYKCKVSNKALP |
| | | | APIEKTISKAKGQPREPQVYTLPPSREEMTKNQVSLTCLVKGFYPSD |
| | | | IAVEWESNGQPENNYKTTPPVLDSDGSFFLYSKLTVDKSRWQQGNVF |
| | | | SCSVMHEALHNHYTQKSLSLSPGKGGGGSGGGGSGGGGSGGGGSGGG |
| | | | GSGGGGSDKTHTCPPCPAPELLGGPSVFLFPPKPKDTLMISRTPEVT |
| | | | CVVVDVSHEDPEVKFNWYVDGVEVHNAKTKPCEEQYGSTYRCVSVLT |
| | | | VLHQDWLNGKEYKCKVSNKALPAPIEKTISKAKGQPREPQVYTLPPS |
| | | | REEMTKNQVSLTCLVKGFYPSDIAVEWESNGQPENNYKTTPPVLDSD |
| | | | GSFFLYSKLTVDKSRWQQGNVFSCSVMHEALHNHYTQKSLSLSPGK |
| 931. | CD70_22xCD | VH | EVQLLESGGGLVQPGGSLRLSCAASGFTFSTYAMSWVRQAPGKGLEW |
| | 3-scFc | | VSLISGSGGRTYYAESVKGRFTISRDNSKNTLYLQMNSLRAEDTAVY |
| | | | YCAKHDYSNYPYFDYWGQGTLVTVSS |
| 932. | CD70_22xCD | VL | EIVLTQSPGTLSLSPGERATLSCRASQGVRSSYLAWYQQKPGQAPRL |
| | 3-scFc | | LIYGASSRATGIPDRFSGSGSGTDFTLTINRLEPEDFAVYYCQQYGS |
| | | | SPPTFGGGTKVDIK |
| 933. | CD70_22xCD | scFv | EVQLLESGGGLVQPGGSLRLSCAASGFTFSTYAMSWVRQAPGKGLEW |
| | 3-scFc | | VSLISGSGGRTYYAESVKGRFTISRDNSKNTLYLQMNSLRAEDTAVY |
| | | | YCAKHDYSNYPYFDYWGQGTLVTVSSGGGGSGGGGSGGGGSEIVLTQ |
| | | | SPGTLSLSPGERATLSCRASQGVRSSYLAWYQQKPGQAPRLLIYGAS |
| | | | SRATGIPDRFSGSGSGTDFTLTINRLEPEDFAVYYCQQYGSSPPTFG |
| | | | GGTKVDIK |
| 934. | CD70_22xCD | bispecific | EVQLLESGGGLVQPGGSLRLSCAASGFTFSTYAMSWVRQAPGKGLEW |
| | 3-scFc | molecule | VSLISGSGGRTYYAESVKGRFTISRDNSKNTLYLQMNSLRAEDTAVY |
| | | | YCAKHDYSNYPYFDYWGQGTLVTVSSGGGGSGGGGSGGGGSEIVLTQ |
| | | | SPGTLSLSPGERATLSCRASQGVRSSYLAWYQQKPGQAPRLLIYGAS |
| | | | SRATGIPDRFSGSGSGTDFTLTINRLEPEDFAVYYCQQYGSSPPTFG |
| | | | GGTKVDIKSGGGGSEVQLVESGGGLVQPGGSLKLSCAASGFTFNKYA |
| | | | MNWVRQAPGKGLEWVARIRSKYNNYATYYADSVKDRFTISRDDSKNT |
| | | | AYLQMNNLKTEDTAVYYCVRHGNFGNSYISYWAYWGQGTLVTVSSGG |
| | | | GGSGGGGSGGGGSQTVVTQEPSLTVSPGGTVTLTCGSSTGAVTSGNY |
| | | | PNWVQQKPGQAPRGLIGGTKFLAPGTPARFSGSLLGGKAALTLSGVQ |
| | | | PEDEAEYYCVLWYSNRWVFGGGTKLTVL |
| 935. | CD70_22xCD | bispecific | EVQLLESGGGLVQPGGSLRLSCAASGFTFSTYAMSWVRQAPGKGLEW |
| | 3-scFc | HLE | VSLISGSGGRTYYAESVKGRFTISRDNSKNTLYLQMNSLRAEDTAVY |
| | | molecule | YCAKHDYSNYPYFDYWGQGTLVTVSSGGGGSGGGGSGGGGSEIVLTQ |
| | | | SPGTLSLSPGERATLSCRASQGVRSSYLAWYQQKPGQAPRLLIYGAS |
| | | | SRATGIPDRFSGSGSGTDFTLTINRLEPEDFAVYYCQQYGSSPPTFG |
| | | | GGTKVDIKSGGGGSEVQLVESGGGLVQPGGSLKLSCAASGFTFNKYA |
| | | | MNWVRQAPGKGLEWVARIRSKYNNYATYYADSVKDRFTISRDDSKNT |
| | | | AYLQMNNLKTEDTAVYYCVRHGNFGNSYISYWAYWGQGTLVTVSSGG |
| | | | GGSGGGGSGGGGSQTVVTQEPSLTVSPGGTVTLTCGSSTGAVTSGNY |
| | | | PNWVQQKPGQAPRGLIGGTKFLAPGTPARFSGSLLGGKAALTLSGVQ |
| | | | PEDEAEYYCVLWYSNRWVFGGGTKLTVLGGGGDKTHTCPPCPAPELL |
| | | | GGPSVFLFPPKPKDTLMISRTPEVTCVVVDVSHEDPEVKFNWYVDGV |
| | | | EVHNAKTKPCEEQYGSTYRCVSVLTVLHQDWLNGKEYKCKVSNKALP |
| | | | APIEKTISKAKGQPREPQVYTLPPSREEMTKNQVSLTCLVKGFYPSD |
| | | | IAVEWESNGQPENNYKTTPPVLDSDGSFFLYSKLTVDKSRWQQGNVF |
| | | | SCSVMHEALHNHYTQKSLSLSPGKGGGGSGGGGSGGGGSGGGGSGGG |
| | | | GSGGGGSDKTHTCPPCPAPELLGGPSVFLFPPKPKDTLMISRTPEVT |
| | | | CVVVDVSHEDPEVKFNWYVDGVEVHNAKTKPCEEQYGSTYRCVSVLT |
| | | | VLHQDWLNGKEYKCKVSNKALPAPIEKTISKAKGQPREPQVYTLPPS |
| | | | REEMTKNQVSLTCLVKGFYPSDIAVEWESNGQPENNYKTTPPVLDSD |
| | | | GSFFLYSKLTVDKSRWQQGNVFSCSVMHEALHNHYTQKSLSLSPGK |
| 936. | CD70_23_CC | VH CDR1 | SYAMS |
| | xCD3-scFc | | |
| 937. | CD70_23_CC | VH CDR2 | AISGSGGRTFYAESVEG |
| | xCD3-scFc | | |
| 938. | CD70_23_CC | VH CDR3 | HDYSNYPYFDY |
| | xCD3-scFc | | |
| 939. | CD70_23_CC | VL CDR1 | RASQSVRSNYLA |
| | xCD3-scFc | | |
| 940. | CD70_23_CC | VL CDR2 | GASSRAT |
| | xCD3-scFc | | |
| 941. | CD70_23_CC | VL CDR3 | QQYGSSPPT |
| | xCD3-scFc | | |
| 942. | CD70_23_CC | VH | EVQLLESGGGVVQPGRSLRLSCAASGFTFSSYAMSWVRQAPGKCLEW |
| | xCD3-scFc | | VSAISGSGGRTFYAESVEGRFTISRDNSKNTLYLQMNSLRAEDTAVY |
| | | | YCAKHDYSNYPYFDYWGQGTLVTVSS |
| 943. | CD70_23_CC | VL | EIVLTQSPGTLSLSPGERATLSCRASQSVRSNYLAWYQQKPGQAPRL |
| | xCD3-scFc | | LIYGASSRATGIPDRFSGSGSGTDFTLTINRLEPEDFAVYYCQQYGS |
| | | | SPPTFGCGTKVDIK |
| 944. | CD70_23_CC | scFv | EVQLLESGGGVVQPGRSLRLSCAASGFTFSSYAMSWVRQAPGKCLEW |
| | xCD3-scFc | | VSAISGSGGRTFYAESVEGRFTISRDNSKNTLYLQMNSLRAEDTAVY |
| | | | YCAKHDYSNYPYFDYWGQGTLVTVSSGGGGSGGGGSGGGGSEIVLTQ |
| | | | SPGTLSLSPGERATLSCRASQSVRSNYLAWYQQKPGQAPRLLIYGAS |
| | | | SRATGIPDRFSGSGSGTDFTLTINRLEPEDFAVYYCQQYGSSPPTFG |
| | | | CGTKVDIK |
| 945. | CD70_23_CC | bispecific | EVQLLESGGGVVQPGRSLRLSCAASGFTFSSYAMSWVRQAPGKCLEW |
| | xCD3-scFc | molecule | VSAISGSGGRTFYAESVEGRFTISRDNSKNTLYLQMNSLRAEDTAVY |
| | | | YCAKHDYSNYPYFDYWGQGTLVTVSSGGGGSGGGGSGGGGSEIVLTQ |
| | | | SPGTLSLSPGERATLSCRASQSVRSNYLAWYQQKPGQAPRLLIYGAS |
| | | | SRATGIPDRFSGSGSGTDFTLTINRLEPEDFAVYYCQQYGSSPPTFG |
| | | | CGTKVDIKSGGGGSEVQLVESGGGLVQPGGSLKLSCAASGFTFNKYA |
| | | | MNWVRQAPGKGLEWVARIRSKYNNYATYYADSVKDRFTISRDDSKNT |
| | | | AYLQMNNLKTEDTAVYYCVRHGNFGNSYISYWAYWGQGTLVTVSSGG |
| | | | GGSGGGGSGGGGSQTVVTQEPSLTVSPGGTVTLTCGSSTGAVTSGNY |
| | | | PNWVQQKPGQAPRGLIGGTKFLAPGTPARFSGSLLGGKAALTLSGVQ |
| | | | PEDEAEYYCVLWYSNRWVFGGGTKLTVL |
| 946. | CD70_23_CC | bispecific | EVQLLESGGGVVQPGRSLRLSCAASGFTFSSYAMSWVRQAPGKCLEW |
| | xCD3-scFc | HLE | VSAISGSGGRTFYAESVEGRFTISRDNSKNTLYLQMNSLRAEDTAVY |
| | | molecule | YCAKHDYSNYPYFDYWGQGTLVTVSSGGGGSGGGGSGGGGSEIVLTQ |
| | | | SPGTLSLSPGERATLSCRASQSVRSNYLAWYQQKPGQAPRLLIYGAS |
| | | | SRATGIPDRFSGSGSGTDFTLTINRLEPEDFAVYYCQQYGSSPPTFG |
| | | | CGTKVDIKSGGGGSEVQLVESGGGLVQPGGSLKLSCAASGFTFNKYA |
| | | | MNWVRQAPGKGLEWVARIRSKYNNYATYYADSVKDRFTISRDDSKNT |
| | | | AYLQMNNLKTEDTAVYYCVRHGNFGNSYISYWAYWGQGTLVTVSSGG |
| | | | GGSGGGGSGGGGSQTVVTQEPSLTVSPGGTVTLTCGSSTGAVTSGNY |
| | | | PNWVQQKPGQAPRGLIGGTKFLAPGTPARFSGSLLGGKAALTLSGVQ |
| | | | PEDEAEYYCVLWYSNRWVFGGGTKLTVLGGGGDKTHTCPPCPAPELL |
| | | | GGPSVFLFPPKPKDTLMISRTPEVTCVVVDVSHEDPEVKFNWYVDGV |
| | | | EVHNAKTKPCEEQYGSTYRCVSVLTVLHQDWLNGKEYKCKVSNKALP |
| | | | APIEKTISKAKGQPREPQVYTLPPSREEMTKNQVSLTCLVKGFYPSD |
| | | | IAVEWESNGQPENNYKTTPPVLDSDGSFFLYSKLTVDKSRWQQGNVF |
| | | | SCSVMHEALHNHYTQKSLSLSPGKGGGGSGGGGSGGGGSGGGGSGGG |
| | | | GSGGGGSDKTHTCPPCPAPELLGGPSVFLFPPKPKDTLMISRTPEVT |
| | | | CVVVDVSHEDPEVKFNWYVDGVEVHNAKTKPCEEQYGSTYRCVSVLT |
| | | | VLHQDWLNGKEYKCKVSNKALPAPIEKTISKAKGQPREPQVYTLPPS |
| | | | REEMTKNQVSLTCLVKGFYPSDIAVEWESNGQPENNYKTTPPVLDSD |
| | | | GSFFLYSKLTVDKSRWQQGNVFSCSVMHEALHNHYTQKSLSLSPGK |
| 947. | CD70_23xCD | VH | EVQLLESGGGVVQPGRSLRLSCAASGFTFSSYAMSWVRQAPGKGLEW |
| | 3-scFc | | VSAISGSGGRTFYAESVEGRFTISRDNSKNTLYLQMNSLRAEDTAVY |
| | | | YCAKHDYSNYPYFDYWGQGTLVTVSS |
| 948. | CD70_23xCD | VL | EIVLTQSPGTLSLSPGERATLSCRASQSVRSNYLAWYQQKPGQAPRL |
| | 3-scFc | | LIYGASSRATGIPDRFSGSGSGTDFTLTINRLEPEDFAVYYCQQYGS |
| | | | SPPTFGGGTKVDIK |
| 949. | CD70_23xCD | scFv | EVQLLESGGGVVQPGRSLRLSCAASGFTFSSYAMSWVRQAPGKGLEW |
| | 3-scFc | | VSAISGSGGRTFYAESVEGRFTISRDNSKNTLYLQMNSLRAEDTAVY |
| | | | YCAKHDYSNYPYFDYWGQGTLVTVSSGGGGSGGGGSGGGGSEIVLTQ |
| | | | SPGTLSLSPGERATLSCRASQSVRSNYLAWYQQKPGQAPRLLIYGAS |
| | | | SRATGIPDRFSGSGSGTDFTLTINRLEPEDFAVYYCQQYGSSPPTFG |
| | | | GGTKVDIK |
| 950. | CD70_23xCD | bispecific | EVQLLESGGGVVQPGRSLRLSCAASGFTFSSYAMSWVRQAPGKGLEW |
| | 3-scFc | molecule | VSAISGSGGRTFYAESVEGRFTISRDNSKNTLYLQMNSLRAEDTAVY |
| | | | YCAKHDYSNYPYFDYWGQGTLVTVSSGGGGSGGGGSGGGGSEIVLTQ |
| | | | SPGTLSLSPGERATLSCRASQSVRSNYLAWYQQKPGQAPRLLIYGAS |
| | | | SRATGIPDRFSGSGSGTDFTLTINRLEPEDFAVYYCQQYGSSPPTFG |
| | | | GGTKVDIKSGGGGSEVQLVESGGGLVQPGGSLKLSCAASGFTFNKYA |
| | | | MNWVRQAPGKGLEWVARIRSKYNNYATYYADSVKDRFTISRDDSKNT |
| | | | AYLQMNNLKTEDTAVYYCVRHGNFGNSYISYWAYWGQGTLVTVSSGG |
| | | | GGSGGGGSGGGGSQTVVTQEPSLTVSPGGTVTLTCGSSTGAVTSGNY |
| | | | PNWVQQKPGQAPRGLIGGTKFLAPGTPARFSGSLLGGKAALTLSGVQ |
| | | | PEDEAEYYCVLWYSNRWVFGGGTKLTVL |
| 951. | CD70_23xCD | bispecific | EVQLLESGGGVVQPGRSLRLSCAASGFTFSSYAMSWVRQAPGKGLEW |
| | 3-scFc | HLE | VSAISGSGGRTFYAESVEGRFTISRDNSKNTLYLQMNSLRAEDTAVY |
| | | molecule | YCAKHDYSNYPYFDYWGQGTLVTVSSGGGGSGGGGSGGGGSEIVLTQ |
| | | | SPGTLSLSPGERATLSCRASQSVRSNYLAWYQQKPGQAPRLLIYGAS |
| | | | SRATGIPDRFSGSGSGTDFTLTINRLEPEDFAVYYCQQYGSSPPTFG |
| | | | GGTKVDIKSGGGGSEVQLVESGGGLVQPGGSLKLSCAASGFTFNKYA |
| | | | MNWVRQAPGKGLEWVARIRSKYNNYATYYADSVKDRFTISRDDSKNT |
| | | | AYLQMNNLKTEDTAVYYCVRHGNFGNSYISYWAYWGQGTLVTVSSGG |
| | | | GGSGGGGSGGGGSQTVVTQEPSLTVSPGGTVTLTCGSSTGAVTSGNY |
| | | | PNWVQQKPGQAPRGLIGGTKFLAPGTPARFSGSLLGGKAALTLSGVQ |
| | | | PEDEAEYYCVLWYSNRWVFGGGTKLTVLGGGGDKTHTCPPCPAPELL |
| | | | GGPSVFLFPPKPKDTLMISRTPEVTCVVVDVSHEDPEVKFNWYVDGV |
| | | | EVHNAKTKPCEEQYGSTYRCVSVLTVLHQDWLNGKEYKCKVSNKALP |
| | | | APIEKTISKAKGQPREPQVYTLPPSREEMTKNQVSLTCLVKGFYPSD |
| | | | IAVEWESNGQPENNYKTTPPVLDSDGSFFLYSKLTVDKSRWQQGNVF |
| | | | SCSVMHEALHNHYTQKSLSLSPGKGGGGSGGGGSGGGGSGGGGSGGG |
| | | | GSGGGGSDKTHTCPPCPAPELLGGPSVFLFPPKPKDTLMISRTPEVT |
| | | | CVVVDVSHEDPEVKFNWYVDGVEVHNAKTKPCEEQYGSTYRCVSVLT |
| | | | VLHQDWLNGKEYKCKVSNKALPAPIEKTISKAKGQPREPQVYTLPPS |
| | | | REEMTKNQVSLTCLVKGFYPSDIAVEWESNGQPENNYKTTPPVLDSD |
| | | | GSFFLYSKLTVDKSRWQQGNVFSCSVMHEALHNHYTQKSLSLSPGK |
| 952. | CD70_24_CC | VH CDR1 | SYAMS |
| | xCD3-scFc | | |
| 953. | CD70_24_CC | VH CDR2 | VISGSGGITDFAESVKG |
| | xCD3-scFc | | |
| 954. | CD70_24_CC | VH CDR3 | HDYSNYFFFDY |
| | xCD3-scFc | | |
| 955. | CD70_24_CC | VL CDR1 | RASQGISNYLA |
| | xCD3-scFc | | |
| 956. | CD70_24_CC | VL CDR2 | AASILQS |
| | xCD3-scFc | | |
| 957. | CD70_24_CC | VL CDR3 | QQYFAYPIT |
| | xCD3-scFc | | |
| 958. | CD70_24_CC | VH | EVQLLESGGGLVQPGGSLRLSCAASGFTFSSYAMSWVRQAPGKCLEW |
| | xCD3-scFc | | VSVISGSGGITDFAESVKGRFTISRDNSRNTLYLQMNSLRAEDTAVY |
| | | | FCARHDYSNYFFFDYWGQGTLVTVSS |
| 959. | CD70_24_CC | VL | DIQMTQSPSSLSASVGDRVTITCRASQGISNYLAWYQQKPGKVPKLL |
| | xCD3-scFc | | IYAASILQSGVPSKFSGSGSGTDFTLTISSLQPEDFAIYYCQQYFAY |
| | | | PITFGCGTRLEIK |
| 960. | CD70_24_CC | scFv | EVQLLESGGGLVQPGGSLRLSCAASGFTFSSYAMSWVRQAPGKCLEW |
| | xCD3-scFc | | VSVISGSGGITDFAESVKGRFTISRDNSRNTLYLQMNSLRAEDTAVY |
| | | | FCARHDYSNYFFFDYWGQGTLVTVSSGGGGSGGGGSGGGGSDIQMTQ |
| | | | SPSSLSASVGDRVTITCRASQGISNYLAWYQQKPGKVPKLLIYAASI |
| | | | LQSGVPSKFSGSGSGTDFTLTISSLQPEDFAIYYCQQYFAYPITFGC |
| | | | GTRLEIK |
| 961. | CD70_24_CC | bispecific | EVQLLESGGGLVQPGGSLRLSCAASGFTFSSYAMSWVRQAPGKCLEW |
| | xCD3-scFc | molecule | VSVISGSGGITDFAESVKGRFTISRDNSRNTLYLQMNSLRAEDTAVY |
| | | | FCARHDYSNYFFFDYWGQGTLVTVSSGGGGSGGGGSGGGGSDIQMTQ |
| | | | SPSSLSASVGDRVTITCRASQGISNYLAWYQQKPGKVPKLLIYAASI |
| | | | LQSGVPSKFSGSGSGTDFTLTISSLQPEDFAIYYCQQYFAYPITFGC |
| | | | GTRLEIKSGGGGSEVQLVESGGGLVQPGGSLKLSCAASGFTFNKYAM |
| | | | NWVRQAPGKGLEWVARIRSKYNNYATYYADSVKDRFTISRDDSKNTA |
| | | | YLQMNNLKTEDTAVYYCVRHGNFGNSYISYWAYWGQGTLVTVSSGGG |
| | | | GSGGGGSGGGGSQTVVTQEPSLTVSPGGTVTLTCGSSTGAVTSGNYP |
| | | | NWVQQKPGQAPRGLIGGTKFLAPGTPARFSGSLLGGKAALTLSGVQP |
| | | | EDEAEYYCVLWYSNRWVFGGGTKLTVL |
| 962. | CD70_24_CC | bispecific | EVQLLESGGGLVQPGGSLRLSCAASGFTFSSYAMSWVRQAPGKCLEW |
| | xCD3-scFc | HLE | VSVISGSGGITDFAESVKGRFTISRDNSRNTLYLQMNSLRAEDTAVY |
| | | molecule | FCARHDYSNYFFFDYWGQGTLVTVSSGGGGSGGGGSGGGGSDIQMTQ |
| | | | SPSSLSASVGDRVTITCRASQGISNYLAWYQQKPGKVPKLLIYAASI |
| | | | LQSGVPSKFSGSGSGTDFTLTISSLQPEDFAIYYCQQYFAYPITFGC |
| | | | GTRLEIKSGGGGSEVQLVESGGGLVQPGGSLKLSCAASGFTFNKYAM |
| | | | NWVRQAPGKGLEWVARIRSKYNNYATYYADSVKDRFTISRDDSKNTA |
| | | | YLQMNNLKTEDTAVYYCVRHGNFGNSYISYWAYWGQGTLVTVSSGGG |
| | | | GSGGGGSGGGGSQTVVTQEPSLTVSPGGTVTLTCGSSTGAVTSGNYP |
| | | | NWVQQKPGQAPRGLIGGTKFLAPGTPARFSGSLLGGKAALTLSGVQP |
| | | | EDEAEYYCVLWYSNRWVFGGGTKLTVLGGGGDKTHTCPPCPAPELLG |
| | | | GPSVFLFPPKPKDTLMISRTPEVTCVVVDVSHEDPEVKFNWYVDGVE |
| | | | VHNAKTKPCEEQYGSTYRCVSVLTVLHQDWLNGKEYKCKVSNKALPA |
| | | | PIEKTISKAKGQPREPQVYTLPPSREEMTKNQVSLTCLVKGFYPSDI |
| | | | AVEWESNGQPENNYKTTPPVLDSDGSFFLYSKLTVDKSRWQQGNVFS |
| | | | CSVMHEALHNHYTQKSLSLSPGKGGGGSGGGGSGGGGSGGGGSGGGG |
| | | | SGGGGSDKTHTCPPCPAPELLGGPSVFLFPPKPKDTLMISRTPEVTC |
| | | | VVVDVSHEDPEVKFNWYVDGVEVHNAKTKPCEEQYGSTYRCVSVLTV |
| | | | LHQDWLNGKEYKCKVSNKALPAPIEKTISKAKGQPREPQVYTLPPSR |
| | | | EEMTKNQVSLTCLVKGFYPSDIAVEWESNGQPENNYKTTPPVLDSDG |
| | | | SFFLYSKLTVDKSRWQQGNVFSCSVMHEALHNHYTQKSLSLSPGK |
| 963. | CD70_24xCD | VH | EVQLLESGGGLVQPGGSLRLSCAASGFTFSSYAMSWVRQAPGKGLEW |
| | 3-scFc | | VSVISGSGGITDFAESVKGRFTISRDNSRNTLYLQMNSLRAEDTAVY |
| | | | FCARHDYSNYFFFDYWGQGTLVTVSS |
| 964. | CD70_24xCD | VL | DIQMTQSPSSLSASVGDRVTITCRASQGISNYLAWYQQKPGKVPKLL |
| | 3-scFc | | IYAASILQSGVPSKFSGSGSGTDFTLTISSLQPEDFAIYYCQQYFAY |
| | | | PITFGQGTRLEIK |
| 965. | CD70_24xCD | scFv | EVQLLESGGGLVQPGGSLRLSCAASGFTFSSYAMSWVRQAPGKGLEW |
| | 3-scFc | | VSVISGSGGITDFAESVKGRFTISRDNSRNTLYLQMNSLRAEDTAVY |
| | | | FCARHDYSNYFFFDYWGQGTLVTVSSGGGGSGGGGSGGGGSDIQMTQ |
| | | | SPSSLSASVGDRVTITCRASQGISNYLAWYQQKPGKVPKLLIYAASI |
| | | | LQSGVPSKFSGSGSGTDFTLTISSLQPEDFAIYYCQQYFAYPITFGQ |
| | | | GTRLEIK |
| 966. | CD70_24xCD | bispecific | EVQLLESGGGLVQPGGSLRLSCAASGFTFSSYAMSWVRQAPGKGLEW |
| | 3-scFc | molecule | VSVISGSGGITDFAESVKGRFTISRDNSRNTLYLQMNSLRAEDTAVY |
| | | | FCARHDYSNYFFFDYWGQGTLVTVSSGGGGSGGGGSGGGGSDIQMTQ |
| | | | SPSSLSASVGDRVTITCRASQGISNYLAWYQQKPGKVPKLLIYAASI |
| | | | LQSGVPSKFSGSGSGTDFTLTISSLQPEDFAIYYCQQYFAYPITFGQ |
| | | | GTRLEIKSGGGGSEVQLVESGGGLVQPGGSLKLSCAASGFTFNKYAM |
| | | | NWVRQAPGKGLEWVARIRSKYNNYATYYADSVKDRFTISRDDSKNTA |
| | | | YLQMNNLKTEDTAVYYCVRHGNFGNSYISYWAYWGQGTLVTVSSGGG |
| | | | GSGGGGSGGGGSQTVVTQEPSLTVSPGGTVTLTCGSSTGAVTSGNYP |
| | | | NWVQQKPGQAPRGLIGGTKFLAPGTPARFSGSLLGGKAALTLSGVQP |
| | | | EDEAEYYCVLWYSNRWVFGGGTKLTVL |
| 967. | CD70_24xCD | bispecific | EVQLLESGGGLVQPGGSLRLSCAASGFTFSSYAMSWVRQAPGKGLEW |
| | 3-scFc | HLE | VSVISGSGGITDFAESVKGRFTISRDNSRNTLYLQMNSLRAEDTAVY |
| | | molecule | FCARHDYSNYFFFDYWGQGTLVTVSSGGGGSGGGGSGGGGSDIQMTQ |
| | | | SPSSLSASVGDRVTITCRASQGISNYLAWYQQKPGKVPKLLIYAASI |
| | | | LQSGVPSKFSGSGSGTDFTLTISSLQPEDFAIYYCQQYFAYPITFGQ |
| | | | GTRLEIKSGGGGSEVQLVESGGGLVQPGGSLKLSCAASGFTFNKYAM |
| | | | NWVRQAPGKGLEWVARIRSKYNNYATYYADSVKDRFTISRDDSKNTA |
| | | | YLQMNNLKTEDTAVYYCVRHGNFGNSYISYWAYWGQGTLVTVSSGGG |
| | | | GSGGGGSGGGGSQTVVTQEPSLTVSPGGTVTLTCGSSTGAVTSGNYP |
| | | | NWVQQKPGQAPRGLIGGTKFLAPGTPARFSGSLLGGKAALTLSGVQP |
| | | | EDEAEYYCVLWYSNRWVFGGGTKLTVLGGGGDKTHTCPPCPAPELLG |
| | | | GPSVFLFPPKPKDTLMISRTPEVTCVVVDVSHEDPEVKFNWYVDGVE |
| | | | VHNAKTKPCEEQYGSTYRCVSVLTVLHQDWLNGKEYKCKVSNKALPA |
| | | | PIEKTISKAKGQPREPQVYTLPPSREEMTKNQVSLTCLVKGFYPSDI |
| | | | AVEWESNGQPENNYKTTPPVLDSDGSFFLYSKLTVDKSRWQQGNVFS |
| | | | CSVMHEALHNHYTQKSLSLSPGKGGGGSGGGGSGGGGSGGGGSGGGG |
| | | | SGGGGSDKTHTCPPCPAPELLGGPSVFLFPPKPKDTLMISRTPEVTC |
| | | | VVVDVSHEDPEVKFNWYVDGVEVHNAKTKPCEEQYGSTYRCVSVLTV |
| | | | LHQDWLNGKEYKCKVSNKALPAPIEKTISKAKGQPREPQVYTLPPSR |
| | | | EEMTKNQVSLTCLVKGFYPSDIAVEWESNGQPENNYKTTPPVLDSDG |
| | | | SFFLYSKLTVDKSRWQQGNVFSCSVMHEALHNHYTQKSLSLSPGK |
| 968. | CD70_25_CC | VH CDR1 | SYAMS |
| | xCD3-scFc | | |
| 969. | CD70_25_CC | VH CDR2 | AISGSGGRTFYAESVEG |
| | xCD3-scFc | | |
| 970. | CD70_25_CC | VH CDR3 | HDYSNYPYFDY |
| | xCD3-scFc | | |
| 971. | CD70_25_CC | VL CDR1 | RASQSVRSSYLA |
| | xCD3-scFc | | |
| 972. | CD70_25_CC | VL CDR2 | GASSRAT |
| | xCD3-scFc | | |
| 973. | CD70_25_CC | VL CDR3 | QQYGSSPPT |
| | xCD3-scFc | | |
| 974. | CD70_25_CC | VH | EVQLLESGGGMVQPGGSLRLSCAASGFTFSSYAMSWVRQAPGKCLEW |
| | xCD3-scFc | | VSAISGSGGRTFYAESVEGRFTISRDNSKNTLYLQMNSLRAEDTAVY |
| | | | YCAKHDYSNYPYFDYWGQGTLVTVSS |
| 975. | CD70_25_CC | VL | EIVLTQSPGTLSLSPGERATLSCRASQSVRSSYLAWYQQKPGQAPRL |
| | xCD3-scFc | | LIYGASSRATGIPDRFSGSGSGTDFTLTISRLEPEDFAVYFCQQYGS |
| | | | SPPTFGCGTRLEIK |
| 976. | CD70_25_CC | scFv | EVQLLESGGGMVQPGGSLRLSCAASGFTFSSYAMSWVRQAPGKCLEW |
| | xCD3-scFc | | VSAISGSGGRTFYAESVEGRFTISRDNSKNTLYLQMNSLRAEDTAVY |
| | | | YCAKHDYSNYPYFDYWGQGTLVTVSSGGGGSGGGGSGGGGSEIVLTQ |
| | | | SPGTLSLSPGERATLSCRASQSVRSSYLAWYQQKPGQAPRLLIYGAS |
| | | | SRATGIPDRFSGSGSGTDFTLTISRLEPEDFAVYFCQQYGSSPPTFG |
| | | | CGTRLEIK |
| 977. | CD70_25_CC | bispecific | EVQLLESGGGMVQPGGSLRLSCAASGFTFSSYAMSWVRQAPGKCLEW |
| | xCD3-scFc | molecule | VSAISGSGGRTFYAESVEGRFTISRDNSKNTLYLQMNSLRAEDTAVY |
| | | | YCAKHDYSNYPYFDYWGQGTLVTVSSGGGGSGGGGSGGGGSEIVLTQ |
| | | | SPGTLSLSPGERATLSCRASQSVRSSYLAWYQQKPGQAPRLLIYGAS |
| | | | SRATGIPDRFSGSGSGTDFTLTISRLEPEDFAVYFCQQYGSSPPTFG |
| | | | CGTRLEIKSGGGGSEVQLVESGGGLVQPGGSLKLSCAASGFTFNKYA |
| | | | MNWVRQAPGKGLEWVARIRSKYNNYATYYADSVKDRFTISRDDSKNT |
| | | | AYLQMNNLKTEDTAVYYCVRHGNFGNSYISYWAYWGQGTLVTVSSGG |
| | | | GGSGGGGSGGGGSQTVVTQEPSLTVSPGGTVTLTCGSSTGAVTSGNY |
| | | | PNWVQQKPGQAPRGLIGGTKFLAPGTPARFSGSLLGGKAALTLSGVQ |
| | | | PEDEAEYYCVLWYSNRWVFGGGTKLTVL |
| 978. | CD70_25_CC | bispecific | EVQLLESGGGMVQPGGSLRLSCAASGFTFSSYAMSWVRQAPGKCLEW |
| | xCD3-scFc | HLE | VSAISGSGGRTFYAESVEGRFTISRDNSKNTLYLQMNSLRAEDTAVY |
| | | molecule | YCAKHDYSNYPYFDYWGQGTLVTVSSGGGGSGGGGSGGGGSEIVLTQ |
| | | | SPGTLSLSPGERATLSCRASQSVRSSYLAWYQQKPGQAPRLLIYGAS |
| | | | SRATGIPDRFSGSGSGTDFTLTISRLEPEDFAVYFCQQYGSSPPTFG |
| | | | CGTRLEIKSGGGGSEVQLVESGGGLVQPGGSLKLSCAASGFTFNKYA |
| | | | MNWVRQAPGKGLEWVARIRSKYNNYATYYADSVKDRFTISRDDSKNT |
| | | | AYLQMNNLKTEDTAVYYCVRHGNFGNSYISYWAYWGQGTLVTVSSGG |
| | | | GGSGGGGSGGGGSQTVVTQEPSLTVSPGGTVTLTCGSSTGAVTSGNY |
| | | | PNWVQQKPGQAPRGLIGGTKFLAPGTPARFSGSLLGGKAALTLSGVQ |
| | | | PEDEAEYYCVLWYSNRWVFGGGTKLTVLGGGGDKTHTCPPCPAPELL |
| | | | GGPSVFLFPPKPKDTLMISRTPEVTCVVVDVSHEDPEVKFNWYVDGV |
| | | | EVHNAKTKPCEEQYGSTYRCVSVLTVLHQDWLNGKEYKCKVSNKALP |
| | | | APIEKTISKAKGQPREPQVYTLPPSREEMTKNQVSLTCLVKGFYPSD |
| | | | IAVEWESNGQPENNYKTTPPVLDSDGSFFLYSKLTVDKSRWQQGNVF |
| | | | SCSVMHEALHNHYTQKSLSLSPGKGGGGSGGGGSGGGGSGGGGSGGG |
| | | | GSGGGGSDKTHTCPPCPAPELLGGPSVFLFPPKPKDTLMISRTPEVT |
| | | | CVVVDVSHEDPEVKFNWYVDGVEVHNAKTKPCEEQYGSTYRCVSVLT |
| | | | VLHQDWLNGKEYKCKVSNKALPAPIEKTISKAKGQPREPQVYTLPPS |
| | | | REEMTKNQVSLTCLVKGFYPSDIAVEWESNGQPENNYKTTPPVLDSD |
| | | | GSFFLYSKLTVDKSRWQQGNVFSCSVMHEALHNHYTQKSLSLSPGK |
| 979. | CD70_25xCD | VH | EVQLLESGGGMVQPGGSLRLSCAASGFTFSSYAMSWVRQAPGKGLEW |
| | 3-scFc | | VSAISGSGGRTFYAESVEGRFTISRDNSKNTLYLQMNSLRAEDTAVY |
| | | | YCAKHDYSNYPYFDYWGQGTLVTVSS |
| 980. | CD70_25xCD | VL | EIVLTQSPGTLSLSPGERATLSCRASQSVRSSYLAWYQQKPGQAPRL |
| | 3-scFc | | LIYGASSRATGIPDRFSGSGSGTDFTLTISRLEPEDFAVYFCQQYGS |
| | | | SPPTFGGGTRLEIK |
| 981. | CD70_25xCD | scFv | EVQLLESGGGMVQPGGSLRLSCAASGFTFSSYAMSWVRQAPGKGLEW |
| | 3-scFc | | VSAISGSGGRTFYAESVEGRFTISRDNSKNTLYLQMNSLRAEDTAVY |
| | | | YCAKHDYSNYPYFDYWGQGTLVTVSSGGGGSGGGGSGGGGSEIVLTQ |
| | | | SPGTLSLSPGERATLSCRASQSVRSSYLAWYQQKPGQAPRLLIYGAS |
| | | | SRATGIPDRFSGSGSGTDFTLTISRLEPEDFAVYFCQQYGSSPPTFG |
| | | | GGTRLEIK |
| 982. | CD70_25xCD | bispecific | EVQLLESGGGMVQPGGSLRLSCAASGFTFSSYAMSWVRQAPGKGLEW |
| | 3-scFc | molecule | VSAISGSGGRTFYAESVEGRFTISRDNSKNTLYLQMNSLRAEDTAVY |
| | | | YCAKHDYSNYPYFDYWGQGTLVTVSSGGGGSGGGGSGGGGSEIVLTQ |
| | | | SPGTLSLSPGERATLSCRASQSVRSSYLAWYQQKPGQAPRLLIYGAS |
| | | | SRATGIPDRFSGSGSGTDFTLTISRLEPEDFAVYFCQQYGSSPPTFG |
| | | | GGTRLEIKSGGGGSEVQLVESGGGLVQPGGSLKLSCAASGFTFNKYA |
| | | | MNWVRQAPGKGLEWVARIRSKYNNYATYYADSVKDRFTISRDDSKNT |
| | | | AYLQMNNLKTEDTAVYYCVRHGNFGNSYISYWAYWGQGTLVTVSSGG |
| | | | GGSGGGGSGGGGSQTVVTQEPSLTVSPGGTVTLTCGSSTGAVTSGNY |
| | | | PNWVQQKPGQAPRGLIGGTKFLAPGTPARFSGSLLGGKAALTLSGVQ |
| | | | PEDEAEYYCVLWYSNRWVFGGGTKLTVL |
| 983. | CD70_25xCD | bispecific | EVQLLESGGGMVQPGGSLRLSCAASGFTFSSYAMSWVRQAPGKGLEW |
| | 3-scFc | HLE | VSAISGSGGRTFYAESVEGRFTISRDNSKNTLYLQMNSLRAEDTAVY |
| | | molecule | YCAKHDYSNYPYFDYWGQGTLVTVSSGGGGSGGGGSGGGGSEIVLTQ |
| | | | SPGTLSLSPGERATLSCRASQSVRSSYLAWYQQKPGQAPRLLIYGAS |
| | | | SRATGIPDRFSGSGSGTDFTLTISRLEPEDFAVYFCQQYGSSPPTFG |
| | | | GGTRLEIKSGGGGSEVQLVESGGGLVQPGGSLKLSCAASGFTFNKYA |
| | | | MNWVRQAPGKGLEWVARIRSKYNNYATYYADSVKDRFTISRDDSKNT |
| | | | AYLQMNNLKTEDTAVYYCVRHGNFGNSYISYWAYWGQGTLVTVSSGG |
| | | | GGSGGGGSGGGGSQTVVTQEPSLTVSPGGTVTLTCGSSTGAVTSGNY |
| | | | PNWVQQKPGQAPRGLIGGTKFLAPGTPARFSGSLLGGKAALTLSGVQ |
| | | | PEDEAEYYCVLWYSNRWVFGGGTKLTVLGGGGDKTHTCPPCPAPELL |
| | | | GGPSVFLFPPKPKDTLMISRTPEVTCVVVDVSHEDPEVKFNWYVDGV |
| | | | EVHNAKTKPCEEQYGSTYRCVSVLTVLHQDWLNGKEYKCKVSNKALP |
| | | | APIEKTISKAKGQPREPQVYTLPPSREEMTKNQVSLTCLVKGFYPSD |
| | | | IAVEWESNGQPENNYKTTPPVLDSDGSFFLYSKLTVDKSRWQQGNVF |
| | | | SCSVMHEALHNHYTQKSLSLSPGKGGGGSGGGGSGGGGSGGGGSGGG |
| | | | GSGGGGSDKTHTCPPCPAPELLGGPSVFLFPPKPKDTLMISRTPEVT |
| | | | CVVVDVSHEDPEVKFNWYVDGVEVHNAKTKPCEEQYGSTYRCVSVLT |
| | | | VLHQDWLNGKEYKCKVSNKALPAPIEKTISKAKGQPREPQVYTLPPS |
| | | | REEMTKNQVSLTCLVKGFYPSDIAVEWESNGQPENNYKTTPPVLDSD |
| | | | GSFFLYSKLTVDKSRWQQGNVFSCSVMHEALHNHYTQKSLSLSPGK |
| 984. | CD70_26_CC | VH CDR1 | IYAMS |
| | xCD3-scFc | | |
| 985. | CD70_26_CC | VH CDR2 | AIGGSGGSTFYAESVKG |
| | xCD3-scFc | | |
| 986. | CD70_26_CC | VH CDR3 | HDYSNYPYFDY |
| | xCD3-scFc | | |
| 987. | CD70_26_CC | VL CDR1 | RASQSVRSSYVA |
| | xCD3-scFc | | |
| 988. | CD70_26_CC | VL CDR2 | GASSRAT |
| | xCD3-scFc | | |
| 989. | CD70_26_CC | VL CDR3 | QQYGDLPFT |
| | xCD3-scFc | | |
| 990. | CD70_26_CC | VH | EVQLLESGGGLVQPGGSLRLSCAASGFTFSIYAMSWVRQAPGKCLEW |
| | xCD3-scFc | | VSAIGGSGGSTFYAESVKGRFTISRDNSKNTLYLQMNSLRAEDTAVY |
| | | | YCAKHDYSNYPYFDYWGQGTLVTVSS |
| 991. | CD70_26_CC | VL | EIVLTQSPGTLSLSPGERATLSCRASQSVRSSYVAWYQQKPGQAPRL |
| | xCD3-scFc | | LIYGASSRATGIPDRFSGSGSGTDFTLTISRLEPEDFAVYYCQQYGD |
| | | | LPFTFGCGTRLEIK |
| 992. | CD70_26_CC | scFv | EVQLLESGGGLVQPGGSLRLSCAASGFTFSIYAMSWVRQAPGKCLEW |
| | xCD3-scFc | | VSAIGGSGGSTFYAESVKGRFTISRDNSKNTLYLQMNSLRAEDTAVY |
| | | | YCAKHDYSNYPYFDYWGQGTLVTVSSGGGGSGGGGSGGGGSEIVLTQ |
| | | | SPGTLSLSPGERATLSCRASQSVRSSYVAWYQQKPGQAPRLLIYGAS |
| | | | SRATGIPDRFSGSGSGTDFTLTISRLEPEDFAVYYCQQYGDLPFTFG |
| | | | CGTRLEIK |
| 993. | CD70_26_CC | bispecific | EVQLLESGGGLVQPGGSLRLSCAASGFTFSIYAMSWVRQAPGKCLEW |
| | xCD3-scFc | molecule | VSAIGGSGGSTFYAESVKGRFTISRDNSKNTLYLQMNSLRAEDTAVY |
| | | | YCAKHDYSNYPYFDYWGQGTLVTVSSGGGGSGGGGSGGGGSEIVLTQ |
| | | | SPGTLSLSPGERATLSCRASQSVRSSYVAWYQQKPGQAPRLLIYGAS |
| | | | SRATGIPDRFSGSGSGTDFTLTISRLEPEDFAVYYCQQYGDLPFTFG |
| | | | CGTRLEIKSGGGGSEVQLVESGGGLVQPGGSLKLSCAASGFTFNKYA |
| | | | MNWVRQAPGKGLEWVARIRSKYNNYATYYADSVKDRFTISRDDSKNT |
| | | | AYLQMNNLKTEDTAVYYCVRHGNFGNSYISYWAYWGQGTLVTVSSGG |
| | | | GGSGGGGSGGGGSQTVVTQEPSLTVSPGGTVTLTCGSSTGAVTSGNY |
| | | | PNWVQQKPGQAPRGLIGGTKFLAPGTPARFSGSLLGGKAALTLSGVQ |
| | | | PEDEAEYYCVLWYSNRWVFGGGTKLTVL |
| 994. | CD70_26_CC | bispecific | EVQLLESGGGLVQPGGSLRLSCAASGFTFSIYAMSWVRQAPGKCLEW |
| | xCD3-scFc | HLE | VSAIGGSGGSTFYAESVKGRFTISRDNSKNTLYLQMNSLRAEDTAVY |
| | | molecule | YCAKHDYSNYPYFDYWGQGTLVTVSSGGGGSGGGGSGGGGSEIVLTQ |
| | | | SPGTLSLSPGERATLSCRASQSVRSSYVAWYQQKPGQAPRLLIYGAS |
| | | | SRATGIPDRFSGSGSGTDFTLTISRLEPEDFAVYYCQQYGDLPFTFG |
| | | | CGTRLEIKSGGGGSEVQLVESGGGLVQPGGSLKLSCAASGFTFNKYA |
| | | | MNWVRQAPGKGLEWVARIRSKYNNYATYYADSVKDRFTISRDDSKNT |
| | | | AYLQMNNLKTEDTAVYYCVRHGNFGNSYISYWAYWGQGTLVTVSSGG |
| | | | GGSGGGGSGGGGSQTVVTQEPSLTVSPGGTVTLTCGSSTGAVTSGNY |
| | | | PNWVQQKPGQAPRGLIGGTKFLAPGTPARFSGSLLGGKAALTLSGVQ |
| | | | PEDEAEYYCVLWYSNRWVFGGGTKLTVLGGGGDKTHTCPPCPAPELL |
| | | | GGPSVFLFPPKPKDTLMISRTPEVTCVVVDVSHEDPEVKFNWYVDGV |
| | | | EVHNAKTKPCEEQYGSTYRCVSVLTVLHQDWLNGKEYKCKVSNKALP |
| | | | APIEKTISKAKGQPREPQVYTLPPSREEMTKNQVSLTCLVKGFYPSD |
| | | | IAVEWESNGQPENNYKTTPPVLDSDGSFFLYSKLTVDKSRWQQGNVF |
| | | | SCSVMHEALHNHYTQKSLSLSPGKGGGGSGGGGSGGGGSGGGGSGGG |
| | | | GSGGGGSDKTHTCPPCPAPELLGGPSVFLFPPKPKDTLMISRTPEVT |
| | | | CVVVDVSHEDPEVKFNWYVDGVEVHNAKTKPCEEQYGSTYRCVSVLT |
| | | | VLHQDWLNGKEYKCKVSNKALPAPIEKTISKAKGQPREPQVYTLPPS |
| | | | REEMTKNQVSLTCLVKGFYPSDIAVEWESNGQPENNYKTTPPVLDSD |
| | | | GSFFLYSKLTVDKSRWQQGNVFSCSVMHEALHNHYTQKSLSLSPGK |
| 995. | CD70_26xCD | VH | EVQLLESGGGLVQPGGSLRLSCAASGFTFSIYAMSWVRQAPGKGLEW |
| | 3-scFc | | VSAIGGSGGSTFYAESVKGRFTISRDNSKNTLYLQMNSLRAEDTAVY |
| | | | YCAKHDYSNYPYFDYWGQGTLVTVSS |
| 996. | CD70_26xCD | VL | EIVLTQSPGTLSLSPGERATLSCRASQSVRSSYVAWYQQKPGQAPRL |
| | -scFc | | LIYGASSRATGIPDRFSGSGSGTDFTLTISRLEPEDFAVYYCQQYGD |
| | | | LPFTFGPGTRLEIK |
| 997. | CD70_26xCD | scFv | EVQLLESGGGLVQPGGSLRLSCAASGFTFSIYAMSWVRQAPGKGLEW |
| | 3-scFc | | VSAIGGSGGSTFYAESVKGRFTISRDNSKNTLYLQMNSLRAEDTAVY |
| | | | YCAKHDYSNYPYFDYWGQGTLVTVSSGGGGSGGGGSGGGGSEIVLTQ |
| | | | SPGTLSLSPGERATLSCRASQSVRSSYVAWYQQKPGQAPRLLIYGAS |
| | | | SRATGIPDRFSGSGSGTDFTLTISRLEPEDFAVYYCQQYGDLPFTFG |
| | | | PGTRLEIK |
| 998. | CD70_26xCD | bispecific | EVQLLESGGGLVQPGGSLRLSCAASGFTFSIYAMSWVRQAPGKGLEW |
| | 3-scFc | molecule | VSAIGGSGGSTFYAESVKGRFTISRDNSKNTLYLQMNSLRAEDTAVY |
| | | | YCAKHDYSNYPYFDYWGQGTLVTVSSGGGGSGGGGSGGGGSEIVLTQ |
| | | | SPGTLSLSPGERATLSCRASQSVRSSYVAWYQQKPGQAPRLLIYGAS |
| | | | SRATGIPDRFSGSGSGTDFTLTISRLEPEDFAVYYCQQYGDLPFTFG |
| | | | PGTRLEIKSGGGGSEVQLVESGGGLVQPGGSLKLSCAASGFTFNKYA |
| | | | MNWVRQAPGKGLEWVARIRSKYNNYATYYADSVKDRFTISRDDSKNT |
| | | | AYLQMNNLKTEDTAVYYCVRHGNFGNSYISYWAYWGQGTLVTVSSGG |
| | | | GGSGGGGSGGGGSQTVVTQEPSLTVSPGGTVTLTCGSSTGAVTSGNY |
| | | | PNWVQQKPGQAPRGLIGGTKFLAPGTPARFSGSLLGGKAALTLSGVQ |
| | | | PEDEAEYYCVLWYSNRWVFGGGTKLTVL |
| 999. | CD70_26xCD | bispecific | EVQLLESGGGLVQPGGSLRLSCAASGFTFSIYAMSWVRQAPGKGLEW |
| | 3-scFc | HLE | VSAIGGSGGSTFYAESVKGRFTISRDNSKNTLYLQMNSLRAEDTAVY |
| | | molecule | YCAKHDYSNYPYFDYWGQGTLVTVSSGGGGSGGGGSGGGGSEIVLTQ |
| | | | SPGTLSLSPGERATLSCRASQSVRSSYVAWYQQKPGQAPRLLIYGAS |
| | | | SRATGIPDRFSGSGSGTDFTLTISRLEPEDFAVYYCQQYGDLPFTFG |
| | | | PGTRLEIKSGGGGSEVQLVESGGGLVQPGGSLKLSCAASGFTFNKYA |
| | | | MNWVRQAPGKGLEWVARIRSKYNNYATYYADSVKDRFTISRDDSKNT |
| | | | AYLQMNNLKTEDTAVYYCVRHGNFGNSYISYWAYWGQGTLVTVSSGG |
| | | | GGSGGGGSGGGGSQTVVTQEPSLTVSPGGTVTLTCGSSTGAVTSGNY |
| | | | PNWVQQKPGQAPRGLIGGTKFLAPGTPARFSGSLLGGKAALTLSGVQ |
| | | | PEDEAEYYCVLWYSNRWVFGGGTKLTVLGGGGDKTHTCPPCPAPELL |
| | | | GGPSVFLFPPKPKDTLMISRTPEVTCVVVDVSHEDPEVKFNWYVDGV |
| | | | EVHNAKTKPCEEQYGSTYRCVSVLTVLHQDWLNGKEYKCKVSNKALP |
| | | | APIEKTISKAKGQPREPQVYTLPPSREEMTKNQVSLTCLVKGFYPSD |
| | | | IAVEWESNGQPENNYKTTPPVLDSDGSFFLYSKLTVDKSRWQQGNVF |
| | | | SCSVMHEALHNHYTQKSLSLSPGKGGGGSGGGGSGGGGSGGGGSGGG |
| | | | GSGGGGSDKTHTCPPCPAPELLGGPSVFLFPPKPKDTLMISRTPEVT |
| | | | CVVVDVSHEDPEVKFNWYVDGVEVHNAKTKPCEEQYGSTYRCVSVLT |
| | | | VLHQDWLNGKEYKCKVSNKALPAPIEKTISKAKGQPREPQVYTLPPS |
| | | | REEMTKNQVSLTCLVKGFYPSDIAVEWESNGQPENNYKTTPPVLDSD |
| | | | GSFFLYSKLTVDKSRWQQGNVFSCSVMHEALHNHYTQKSLSLSPGK |
| 1000. | CD70_27_CC | VH CDR1 | SSSYYWG |
| | xCD3-scFc | | |
| 1001. | CD70_27_CC | VH CDR2 | SIYHSGGTYFNPSLKS |
| | xCD3-scFc | | |
| 1002. | CD70_27_CC | VH CDR3 | HYEILTGYYPDVFDI |
| | xCD3-scFc | | |
| 1003. | CD70_27_CC | VL CDR1 | RASQSISSYLN |
| | xCD3-scFc | | |
| 1004. | CD70_27_CC | VL CDR2 | AASNLQS |
| | xCD3-scFc | | |
| 1005. | CD70_27_CC | VL CDR3 | QQSFSSPRT |
| | xCD3-scFc | | |
| 1006. | CD70_27_CC | VH | QVQLQESGPGLVKPSQTLSLTCTVSGGSISSSSYYWGWIRQPPGKCL |
| | xCD3-scFc | | EWIGSIYHSGGTYFNPSLKSRVTISVDTSKNQFSLKLSSVTAADTAV |
| | | | YYCARHYEILTGYYPDVFDIWGQGTMVTVSS |
| 1007. | CD70_27_CC | VL | DIQMTQSPSSLSASVGDRVTITCRASQSISSYLNWYQQKPGKAPKLL |
| | xCD3-scFc | | IYAASNLQSGVSSRFSGSGSGTDFTLTISSLQPEDFATYYCQQSFSS |
| | | | PRTFGCGTKVEIK |
| 1008. | CD70_27_CC | scPv | QVQLQESGPGLVKPSQTLSLTCTVSGGSISSSSYYWGWIRQPPGKCL |
| | xCD3-scFc | | EWIGSIYHSGGTYFNPSLKSRVTISVDTSKNQFSLKLSSVTAADTAV |
| | | | YYCARHYEILTGYYPDVFDIWGQGTMVTVSSGGGGSGGGGSGGGGSD |
| | | | IQMTQSPSSLSASVGDRVTITCRASQSISSYLNWYQQKPGKAPKLLI |
| | | | YAASNLQSGVSSRFSGSGSGTDFTLTISSLQPEDFATYYCQQSFSSP |
| | | | RTFGCGTKVEIK |
| 1009. | CD70_27_CC | bispecific | QVQLQESGPGLVKPSQTLSLTCTVSGGSISSSSYYWGWIRQPPGKCL |
| | xCD3-scFc | molecule | EWIGSIYHSGGTYFNPSLKSRVTISVDTSKNQFSLKLSSVTAADTAV |
| | | | YYCARHYEILTGYYPDVFDIWGQGTMVTVSSGGGGSGGGGSGGGGSD |
| | | | IQMTQSPSSLSASVGDRVTITCRASQSISSYLNWYQQKPGKAPKLLI |
| | | | YAASNLQSGVSSRFSGSGSGTDFTLTISSLQPEDFATYYCQQSFSSP |
| | | | RTFGCGTKVEIKSGGGGSEVQLVESGGGLVQPGGSLKLSCAASGFTF |
| | | | NKYAMNWVRQAPGKGLEWVARIRSKYNNYATYYADSVKDRFTISRDD |
| | | | SKNTAYLQMNNLKTEDTAVYYCVRHGNFGNSYISYWAYWGQGTLVTV |
| | | | SSGGGGSGGGGSGGGGSQTVVTQEPSLTVSPGGTVTLTCGSSTGAVT |
| | | | SGNYPNWVQQKPGQAPRGLIGGTKFLAPGTPARFSGSLLGGKAALTL |
| | | | SGVQPEDEAEYYCVLWYSNRWVFGGGTKLTVL |
| 1010. | CD70_27_CC | bispecific | QVQLQESGPGLVKPSQTLSLTCTVSGGSISSSSYYWGWIRQPPGKCL |
| | xCD3-scFc | HLE | EWIGSIYHSGGTYFNPSLKSRVTISVDTSKNQFSLKLSSVTAADTAV |
| | | molecule | YYCARHYEILTGYYPDVFDIWGQGTMVTVSSGGGGSGGGGSGGGGSD |
| | | | IQMTQSPSSLSASVGDRVTITCRASQSISSYLNWYQQKPGKAPKLLI |
| | | | YAASNLQSGVSSRFSGSGSGTDFTLTISSLQPEDFATYYCQQSFSSP |
| | | | RTFGCGTKVEIKSGGGGSEVQLVESGGGLVQPGGSLKLSCAASGFTF |
| | | | NKYAMNWVRQAPGKGLEWVARIRSKYNNYATYYADSVKDRFTISRDD |
| | | | SKNTAYLQMNNLKTEDTAVYYCVRHGNFGNSYISYWAYWGQGTLVTV |
| | | | SSGGGGSGGGGSGGGGSQTVVTQEPSLTVSPGGTVTLTCGSSTGAVT |
| | | | SGNYPNWVQQKPGQAPRGLIGGTKFLAPGTPARFSGSLLGGKAALTL |
| | | | SGVQPEDEAEYYCVLWYSNRWVFGGGTKLTVLGGGGDKTHTCPPCPA |
| | | | PELLGGPSVFLFPPKPKDTLMISRTPEVTCVVVDVSHEDPEVKFNWY |
| | | | VDGVEVHNAKTKPCEEQYGSTYRCVSVLTVLHQDWLNGKEYKCKVSN |
| | | | KALPAPIEKTISKAKGQPREPQVYTLPPSREEMTKNQVSLTCLVKGF |
| | | | YPSDIAVEWESNGQPENNYKTTPPVLDSDGSFFLYSKLTVDKSRWQQ |
| | | | GNVFSCSVMHEALHNHYTQKSLSLSPGKGGGGSGGGGSGGGGSGGGG |
| | | | SGGGGSGGGGSDKTHTCPPCPAPELLGGPSVFLFPPKPKDTLMISRT |
| | | | PEVTCVVVDVSHEDPEVKFNWYVDGVEVHNAKTKPCEEQYGSTYRCV |
| | | | SVLTVLHQDWLNGKEYKCKVSNKALPAPIEKTISKAKGQPREPQVYT |
| | | | LPPSREEMTKNQVSLTCLVKGFYPSDIAVEWESNGQPENNYKTTPPV |
| | | | LDSDGSFFLYSKLTVDKSRWQQGNVFSCSVMHEALHNHYTQKSLSLS |
| | | | PGK |
| 1011. | CD70_27xCD | VH | QVQLQESGPGLVKPSQTLSLTCTVSGGSISSSSYYWGWIRQPPGKGL |
| | 3-scFc | | EWIGSIYHSGGTYFNPSLKSRVTISVDTSKNQFSLKLSSVTAADTAV |
| | | | YYCARHYEILTGYYPDVFDIWGQGTMVTVSS |
| 1012. | CD70_27xCD | VL | DIQMTQSPSSLSASVGDRVTITCRASQSISSYLNWYQQKPGKAPKLL |
| | 3-scFc | | IYAASNLQSGVSSRFSGSGSGTDFTLTISSLQPEDFATYYCQQSFSS |
| | | | PRTFGQGTKVEIK |
| 1013. | CD70_27xCD | scFv | QVQLQESGPGLVKPSQTLSLTCTVSGGSISSSSYYWGWIRQPPGKGL |
| | 3-scFc | | EWIGSIYHSGGTYFNPSLKSRVTISVDTSKNQFSLKLSSVTAADTAV |
| | | | YYCARHYEILTGYYPDVFDIWGQGTMVTVSSGGGGSGGGGSGGGGSD |
| | | | IQMTQSPSSLSASVGDRVTITCRASQSISSYLNWYQQKPGKAPKLLI |
| | | | YAASNLQSGVSSRFSGSGSGTDFTLTISSLQPEDFATYYCQQSFSSP |
| | | | RTFGQGTKVEIK |
| 1014. | CD70_27xCD | bispecific | QVQLQESGPGLVKPSQTLSLTCTVSGGSISSSSYYWGWIRQPPGKGL |
| | 3-scFc | molecule | EWIGSIYHSGGTYFNPSLKSRVTISVDTSKNQFSLKLSSVTAADTAV |
| | | | YYCARHYEILTGYYPDVFDIWGQGTMVTVSSGGGGSGGGGSGGGGSD |
| | | | IQMTQSPSSLSASVGDRVTITCRASQSISSYLNWYQQKPGKAPKLLI |
| | | | YAASNLQSGVSSRFSGSGSGTDFTLTISSLQPEDFATYYCQQSFSSP |
| | | | RTFGQGTKVEIKSGGGGSEVQLVESGGGLVQPGGSLKLSCAASGFTF |
| | | | NKYAMNWVRQAPGKGLEWVARIRSKYNNYATYYADSVKDRFTISRDD |
| | | | SKNTAYLQMNNLKTEDTAVYYCVRHGNFGNSYISYWAYWGQGTLVTV |
| | | | SSGGGGSGGGGSGGGGSQTVVTQEPSLTVSPGGTVTLTCGSSTGAVT |
| | | | SGNYPNWVQQKPGQAPRGLIGGTKFLAPGTPARFSGSLLGGKAALTL |
| | | | SGVQPEDEAEYYCVLWYSNRWVFGGGTKLTVL |
| 1015. | CD70_27xCD | bispecific | QVQLQESGPGLVKPSQTLSLTCTVSGGSISSSSYYWGWIRQPPGKGL |
| | 3-scFc | HLE | EWIGSIYHSGGTYFNPSLKSRVTISVDTSKNQFSLKLSSVTAADTAV |
| | | molecule | YYCARHYEILTGYYPDVFDIWGQGTMVTVSSGGGGSGGGGSGGGGSD |
| | | | IQMTQSPSSLSASVGDRVTITCRASQSISSYLNWYQQKPGKAPKLLI |
| | | | YAASNLQSGVSSRFSGSGSGTDFTLTISSLQPEDFATYYCQQSFSSP |
| | | | RTFGQGTKVEIKSGGGGSEVQLVESGGGLVQPGGSLKLSCAASGFTF |
| | | | NKYAMNWVRQAPGKGLEWVARIRSKYNNYATYYADSVKDRFTISRDD |
| | | | SKNTAYLQMNNLKTEDTAVYYCVRHGNFGNSYISYWAYWGQGTLVTV |
| | | | SSGGGGSGGGGSGGGGSQTVVTQEPSLTVSPGGTVTLTCGSSTGAVT |
| | | | SGNYPNWVQQKPGQAPRGLIGGTKFLAPGTPARFSGSLLGGKAALTL |
| | | | SGVQPEDEAEYYCVLWYSNRWVFGGGTKLTVLGGGGDKTHTCPPCPA |
| | | | PELLGGPSVFLFPPKPKDTLMISRTPEVTCVVVDVSHEDPEVKFNWY |
| | | | VDGVEVHNAKTKPCEEQYGSTYRCVSVLTVLHQDWLNGKEYKCKVSN |
| | | | KALPAPIEKTISKAKGQPREPQVYTLPPSREEMTKNQVSLTCLVKGF |
| | | | YPSDIAVEWESNGQPENNYKTTPPVLDSDGSFFLYSKLTVDKSRWQQ |
| | | | GNVFSCSVMHEALHNHYTQKSLSLSPGKGGGGSGGGGSGGGGSGGGG |
| | | | SGGGGSGGGGSDKTHTCPPCPAPELLGGPSVFLFPPKPKDTLMISRT |
| | | | PEVTCVVVDVSHEDPEVKFNWYVDGVEVHNAKTKPCEEQYGSTYRCV |
| | | | SVLTVLHQDWLNGKEYKCKVSNKALPAPIEKTISKAKGQPREPQVYT |
| | | | LPPSREEMTKNQVSLTCLVKGFYPSDIAVEWESNGQPENNYKTTPPV |
| | | | LDSDGSFFLYSKLTVDKSRWQQGNVFSCSVMHEALHNHYTQKSLSLS |
| | | | PGK |
| 1016. | CD70_28_CC | VH CDR1 | SYSMN |
| | xCD3-scFc | | |
| 1017. | CD70_28_CC | VH CDR2 | YISSSGGYIYYAESVKG |
| | xCD3-scFc | | |
| 1018. | CD70_28_CC | VH CDR3 | GDYSNYAYFDY |
| | xCD3-scFc | | |
| 1019. | CD70_28_CC | VL CDR1 | RASQGISNYLA |
| | xCD3-scFc | | |
| 1020. | CD70_28_CC | VL CDR2 | AASTLQS |
| | xCD3-scFc | | |
| 1021. | CD70_28_CC | VL CDR3 | QQYYSTPLT |
| | xCD3-scFc | | |
| 1022. | CD70_28_CC | VH | EVQLVESGGGLVKPGGSLRLSCAASGFTFSSYSMNWVRQAPGKCLEW |
| | xCD3-scFc | | VSYISSSGGYIYYAESVKGRFTISRDNAKNSLYLQMNSLRAEDAAVY |
| | | | YCSRGDYSNYAYFDYWGQGTLVTVSS |
| 1023. | CD70_28_CC | VL | DIQMTQSPSSLSASVGDRVTITCRASQGISNYLAWYQQKPGKVPKLL |
| | xCD3-scFc | | IYAASTLQSGVPSRFSGSGSGTDFTLTISSLQAEDVAVYYCQQYYST |
| | | | PLTFGCGTKVEIK |
| 1024. | CD70_28_CC | scFv | EVQLVESGGGLVKPGGSLRLSCAASGFTFSSYSMNWVRQAPGKCLEW |
| | xCD3-scFc | | VSYISSSGGYIYYAESVKGRFTISRDNAKNSLYLQMNSLRAEDAAVY |
| | | | YCSRGDYSNYAYFDYWGQGTLVTVSSGGGGSGGGGSGGGGSDIQMTQ |
| | | | SPSSLSASVGDRVTITCRASQGISNYLAWYQQKPGKVPKLLIYAAST |
| | | | LQSGVPSRFSGSGSGTDFTLTISSLQAEDVAVYYCQQYYSTPLTFGC |
| | | | GTKVEIK |
| 1025. | CD70_28_CC | bispedfic | EVQLVESGGGLVKPGGSLRLSCAASGFTFSSYSMNWVRQAPGKCLEW |
| | xCD3-scFc | molecule | VSYISSSGGYIYYAESVKGRFTISRDNAKNSLYLQMNSLRAEDAAVY |
| | | | YCSRGDYSNYAYFDYWGQGTLVTVSSGGGGSGGGGSGGGGSDIQMTQ |
| | | | SPSSLSASVGDRVTITCRASQGISNYLAWYQQKPGKVPKLLIYAAST |
| | | | LQSGVPSRFSGSGSGTDFTLTISSLQAEDVAVYYCQQYYSTPLTFGC |
| | | | GTKVEIKSGGGGSEVQLVESGGGLVQPGGSLKLSCAASGFTFNKYAM |
| | | | NWVRQAPGKGLEWVARIRSKYNNYATYYADSVKDRFTISRDDSKNTA |
| | | | YLQMNNLKTEDTAVYYCVRHGNFGNSYISYWAYWGQGTLVTVSSGGG |
| | | | GSGGGGSGGGGSQTVVTQEPSLTVSPGGTVTLTCGSSTGAVTSGNYP |
| | | | NWVQQKPGQAPRGLIGGTKFLAPGTPARFSGSLLGGKAALTLSGVQP |
| | | | EDEAEYYCVLWYSNRWVFGGGTKLTVL |
| 1026. | CD70_28_CC | bispecific | EVQLVESGGGLVKPGGSLRLSCAASGFTFSSYSMNWVRQAPGKCLEW |
| | xCD3-scFc | HLE | VSYISSSGGYIYYAESVKGRFTISRDNAKNSLYLQMNSLRAEDAAVY |
| | | molecule | YCSRGDYSNYAYFDYWGQGTLVTVSSGGGGSGGGGSGGGGSDIQMTQ |
| | | | SPSSLSASVGDRVTITCRASQGISNYLAWYQQKPGKVPKLLIYAAST |
| | | | LQSGVPSRFSGSGSGTDFTLTISSLQAEDVAVYYCQQYYSTPLTFGC |
| | | | GTKVEIKSGGGGSEVQLVESGGGLVQPGGSLKLSCAASGFTFNKYAM |
| | | | NWVRQAPGKGLEWVARIRSKYNNYATYYADSVKDRFTISRDDSKNTA |
| | | | YLQMNNLKTEDTAVYYCVRHGNFGNSYISYWAYWGQGTLVTVSSGGG |
| | | | GSGGGGSGGGGSQTVVTQEPSLTVSPGGTVTLTCGSSTGAVTSGNYP |
| | | | NWVQQKPGQAPRGLIGGTKFLAPGTPARFSGSLLGGKAALTLSGVQP |
| | | | EDEAEYYCVLWYSNRWVFGGGTKLTVLGGGGDKTHTCPPCPAPELLG |
| | | | GPSVFLFPPKPKDTLMISRTPEVTCVVVDVSHEDPEVKFNWYVDGVE |
| | | | VHNAKTKPCEEQYGSTYRCVSVLTVLHQDWLNGKEYKCKVSNKALPA |
| | | | PIEKTISKAKGQPREPQVYTLPPSREEMTKNQVSLTCLVKGFYPSDI |
| | | | AVEWESNGQPENNYKTTPPVLDSDGSFFLYSKLTVDKSRWQQGNVFS |
| | | | CSVMHEALHNHYTQKSLSLSPGKGGGGSGGGGSGGGGSGGGGSGGGG |
| | | | SGGGGSDKTHTCPPCPAPELLGGPSVFLFPPKPKDTLMISRTPEVTC |
| | | | VVVDVSHEDPEVKFNWYVDGVEVHNAKTKPCEEQYGSTYRCVSVLTV |
| | | | LHQDWLNGKEYKCKVSNKALPAPIEKTISKAKGQPREPQVYTLPPSR |
| | | | EEMTKNQVSLTCLVKGFYPSDIAVEWESNGQPENNYKTTPPVLDSDG |
| | | | SFFLYSKLTVDKSRWQQGNVFSCSVMHEALHNHYTQKSLSLSPGK |
| 1027. | CD70_28xCD | VH | EVQLVESGGGLVKPGGSLRLSCAASGFTFSSYSMNWVRQAPGKGLEW |
| | 3-scFc | | VSYISSSGGYIYYAESVKGRFTISRDNAKNSLYLQMNSLRAEDAAVY |
| | | | YCSRGDYSNYAYFDYWGQGTLVTVSS |
| 1028. | CD70_28xCD | VL | DIQMTQSPSSLSASVGDRVTITCRASQGISNYLAWYQQKPGKVPKLL |
| | 3-scFc | | IYAASTLQSGVPSRFSGSGSGTDFTLTISSLQAEDVAVYYCQQYYST |
| | | | PLTFGGGTKVEIK |
| 1029. | CD70_28xCD | scFv | EVQLVESGGGLVKPGGSLRLSCAASGFTFSSYSMNWVRQAPGKGLEW |
| | 3-scFc | | VSYISSSGGYIYYAESVKGRFTISRDNAKNSLYLQMNSLRAEDAAVY |
| | | | YCSRGDYSNYAYFDYWGQGTLVTVSSGGGGSGGGGSGGGGSDIQMTQ |
| | | | SPSSLSASVGDRVTITCRASQGISNYLAWYQQKPGKVPKLLIYAAST |
| | | | LQSGVPSRFSGSGSGTDFTLTISSLQAEDVAVYYCQQYYSTPLTFGG |
| | | | GTKVEIK |
| 1030. | CD70_28xCD | bispecific | EVQLVESGGGLVKPGGSLRLSCAASGFTFSSYSMNWVRQAPGKGLEW |
| | 3-scFc | molecule | VSYISSSGGYIYYAESVKGRFTISRDNAKNSLYLQMNSLRAEDAAVY |
| | | | YCSRGDYSNYAYFDYWGQGTLVTVSSGGGGSGGGGSGGGGSDIQMTQ |
| | | | SPSSLSASVGDRVTITCRASQGISNYLAWYQQKPGKVPKLLIYAAST |
| | | | LQSGVPSRFSGSGSGTDFTLTISSLQAEDVAVYYCQQYYSTPLTFGG |
| | | | GTKVEIKSGGGGSEVQLVESGGGLVQPGGSLKLSCAASGFTFNKYAM |
| | | | NWVRQAPGKGLEWVARIRSKYNNYATYYADSVKDRFTISRDDSKNTA |
| | | | YLQMNNLKTEDTAVYYCVRHGNFGNSYISYWAYWGQGTLVTVSSGGG |
| | | | GSGGGGSGGGGSQTVVTQEPSLTVSPGGTVTLTCGSSTGAVTSGNYP |
| | | | NWVQQKPGQAPRGLIGGTKFLAPGTPARFSGSLLGGKAALTLSGVQP |
| | | | EDEAEYYCVLWYSNRWVFGGGTKLTVL |
| 1031. | CD70_28xCD | bispecific | EVQLVESGGGLVKPGGSLRLSCAASGFTFSSYSMNWVRQAPGKGLEW |
| | 3-scFc | HLE | VSYISSSGGYIYYAESVKGRFTISRDNAKNSLYLQMNSLRAEDAAVY |
| | | molecule | YCSRGDYSNYAYFDYWGQGTLVTVSSGGGGSGGGGSGGGGSDIQMTQ |
| | | | SPSSLSASVGDRVTITCRASQGISNYLAWYQQKPGKVPKLLIYAAST |
| | | | LQSGVPSRFSGSGSGTDFTLTISSLQAEDVAVYYCQQYYSTPLTFGG |
| | | | GTKVEIKSGGGGSEVQLVESGGGLVQPGGSLKLSCAASGFTFNKYAM |
| | | | NWVRQAPGKGLEWVARIRSKYNNYATYYADSVKDRFTISRDDSKNTA |
| | | | YLQMNNLKTEDTAVYYCVRHGNFGNSYISYWAYWGQGTLVTVSSGGG |
| | | | GSGGGGSGGGGSQTVVTQEPSLTVSPGGTVTLTCGSSTGAVTSGNYP |
| | | | NWVQQKPGQAPRGLIGGTKFLAPGTPARFSGSLLGGKAALTLSGVQP |
| | | | EDEAEYYCVLWYSNRWVFGGGTKLTVLGGGGDKTHTCPPCPAPELLG |
| | | | GPSVFLFPPKPKDTLMISRTPEVTCVVVDVSHEDPEVKFNWYVDGVE |
| | | | VHNAKTKPCEEQYGSTYRCVSVLTVLHQDWLNGKEYKCKVSNKALPA |
| | | | PIEKTISKAKGQPREPQVYTLPPSREEMTKNQVSLTCLVKGFYPSDI |
| | | | AVEWESNGQPENNYKTTPPVLDSDGSFFLYSKLTVDKSRWQQGNVFS |
| | | | CSVMHEALHNHYTQKSLSLSPGKGGGGSGGGGSGGGGSGGGGSGGGG |
| | | | SGGGGSDKTHTCPPCPAPELLGGPSVFLFPPKPKDTLMISRTPEVTC |
| | | | VVVDVSHEDPEVKFNWYVDGVEVHNAKTKPCEEQYGSTYRCVSVLTV |
| | | | LHQDWLNGKEYKCKVSNKALPAPIEKTISKAKGQPREPQVYTLPPSR |
| | | | EEMTKNQVSLTCLVKGFYPSDIAVEWESNGQPENNYKTTPPVLDSDG |
| | | | SFFLYSKLTVDKSRWQQGNVFSCSVMHEALHNHYTQKSLSLSPGK |
| 1032. | CD70_29_CC | VH CDR1 | VYAMS |
| | xCD3-scFc | | |
| 1033. | CD70_29_CC | VH CDR2 | TISGSGGSTFYAESVKG |
| | xCD3-scFc | | |
| 1034. | CD70_29_CC | VH CDR3 | HDYSNYAYFDY |
| | xCD3-scFc | | |
| 1035. | CD70_29_CC | VL CDR1 | RASQSVRSSYLA |
| | xCD3-scFc | | |
| 1036. | CD70_29_CC | VL CDR2 | GASSRAT |
| | xCD3-scFc | | |
| 1037. | CD70_29_CC | VL CDR3 | QQYGDLPFT |
| | xCD3-scFc | | |
| 1038. | CD70_29_CC | VH | EVQLLESGGGLVQPGGSLRLSCAASGFTFSVYAMSWVRQAPGKCLEW |
| | xCD3-scFc | | VSTISGSGGSTFYAESVKGRFTISRDNSKNTLYLQMNRLRAEDTAVY |
| | | | YCARHDYSNYAYFDYWGQGTLVTVSS |
| 1039. | CD70_29_CC | VL | EIVLTQSPGTLSLSPGERATLSCRASQSVRSSYLAWYQQKPGQAPRL |
| | xCD3-scFc | | LIYGASSRATGIPDRFSGSGSGTDFTLTISRLEPEDFAVYYCQQYGD |
| | | | LPFTFGCGTKVEIK |
| 1040. | CD70_29_CC | scFv | EVQLLESGGGLVQPGGSLRLSCAASGFTFSVYAMSWVRQAPGKCLEW |
| | xCD3-scFc | | VSTISGSGGSTFYAESVKGRFTISRDNSKNTLYLQMNRLRAEDTAVY |
| | | | YCARHDYSNYAYFDYWGQGTLVTVSSGGGGSGGGGSGGGGSEIVLTQ |
| | | | SPGTLSLSPGERATLSCRASQSVRSSYLAWYQQKPGQAPRLLIYGAS |
| | | | SRATGIPDRFSGSGSGTDFTLTISRLEPEDFAVYYCQQYGDLPFTFG |
| | | | CGTKVEIK |
| 1041. | CD70_29_CC | bispecific | EVQLLESGGGLVQPGGSLRLSCAASGFTFSVYAMSWVRQAPGKCLEW |
| | xCD3-scFc | molecule | VSTISGSGGSTFYAESVKGRFTISRDNSKNTLYLQMNRLRAEDTAVY |
| | | | YCARHDYSNYAYFDYWGQGTLVTVSSGGGGSGGGGSGGGGSEIVLTQ |
| | | | SPGTLSLSPGERATLSCRASQSVRSSYLAWYQQKPGQAPRLLIYGAS |
| | | | SRATGIPDRFSGSGSGTDFTLTISRLEPEDFAVYYCQQYGDLPFTFG |
| | | | CGTKVEIKSGGGGSEVQLVESGGGLVQPGGSLKLSCAASGFTFNKYA |
| | | | MNWVRQAPGKGLEWVARIRSKYNNYATYYADSVKDRFTISRDDSKNT |
| | | | AYLQMNNLKTEDTAVYYCVRHGNFGNSYISYWAYWGQGTLVTVSSGG |
| | | | GGSGGGGSGGGGSQTVVTQEPSLTVSPGGTVTLTCGSSTGAVTSGNY |
| | | | PNWVQQKPGQAPRGLIGGTKFLAPGTPARFSGSLLGGKAALTLSGVQ |
| | | | PEDEAEYYCVLWYSNRWVFGGGTKLTVL |
| 1042. | CD70_29_CC | bispecific | EVQLLESGGGLVQPGGSLRLSCAASGFTFSVYAMSWVRQAPGKCLEW |
| | xCD3-scFc | HLE | VSTISGSGGSTFYAESVKGRFTISRDNSKNTLYLQMNRLRAEDTAVY |
| | | molecule | YCARHDYSNYAYFDYWGQGTLVTVSSGGGGSGGGGSGGGGSEIVLTQ |
| | | | SPGTLSLSPGERATLSCRASQSVRSSYLAWYQQKPGQAPRLLIYGAS |
| | | | SRATGIPDRFSGSGSGTDFTLTISRLEPEDFAVYYCQQYGDLPFTFG |
| | | | CGTKVEIKSGGGGSEVQLVESGGGLVQPGGSLKLSCAASGFTFNKYA |
| | | | MNWVRQAPGKGLEWVARIRSKYNNYATYYADSVKDRFTISRDDSKNT |
| | | | AYLQMNNLKTEDTAVYYCVRHGNFGNSYISYWAYWGQGTLVTVSSGG |
| | | | GGSGGGGSGGGGSQTVVTQEPSLTVSPGGTVTLTCGSSTGAVTSGNY |
| | | | PNWVQQKPGQAPRGLIGGTKFLAPGTPARFSGSLLGGKAALTLSGVQ |
| | | | PEDEAEYYCVLWYSNRWVFGGGTKLTVLGGGGDKTHTCPPCPAPELL |
| | | | GGPSVFLFPPKPKDTLMISRTPEVTCVVVDVSHEDPEVKFNWYVDGV |
| | | | EVHNAKTKPCEEQYGSTYRCVSVLTVLHQDWLNGKEYKCKVSNKALP |
| | | | APIEKTISKAKGQPREPQVYTLPPSREEMTKNQVSLTCLVKGFYPSD |
| | | | IAVEWESNGQPENNYKTTPPVLDSDGSFFLYSKLTVDKSRWQQGNVF |
| | | | SCSVMHEALHNHYTQKSLSLSPGKGGGGSGGGGSGGGGSGGGGSGGG |
| | | | GSGGGGSDKTHTCPPCPAPELLGGPSVFLFPPKPKDTLMISRTPEVT |
| | | | CVVVDVSHEDPEVKFNWYVDGVEVHNAKTKPCEEQYGSTYRCVSVLT |
| | | | VLHQDWLNGKEYKCKVSNKALPAPIEKTISKAKGQPREPQVYTLPPS |
| | | | REEMTKNQVSLTCLVKGFYPSDIAVEWESNGQPENNYKTTPPVLDSD |
| | | | GSFFLYSKLTVDKSRWQQGNVFSCSVMHEALHNHYTQKSLSLSPGK |
| 1043. | CD70_29xCD | VH | EVQLLESGGGLVQPGGSLRLSCAASGFTFSVYAMSWVRQAPGKGLEW |
| | 3-scFc | | VSTISGSGGSTFYAESVKGRFTISRDNSKNTLYLQMNRLRAEDTAVY |
| | | | YCARHDYSNYAYFDYWGQGTLVTVSS |
| 1044. | CD70_29xCD | VL | EIVLTQSPGTLSLSPGERATLSCRASQSVRSSYLAWYQQKPGQAPRL |
| | 3-scFc | | LIYGASSRATGIPDRFSGSGSGTDFTLTISRLEPEDFAVYYCQQYGD |
| | | | LPFTFGPGTKVEIK |
| 1045. | CD70_29xCD | scFv | EVQLLESGGGLVQPGGSLRLSCAASGFTFSVYAMSWVRQAPGKGLEW |
| | 3-scFc | | VSTISGSGGSTFYAESVKGRFTISRDNSKNTLYLQMNRLRAEDTAVY |
| | | | YCARHDYSNYAYFDYWGQGTLVTVSSGGGGSGGGGSGGGGSEIVLTQ |
| | | | SPGTLSLSPGERATLSCRASQSVRSSYLAWYQQKPGQAPRLLIYGAS |
| | | | SRATGIPDRFSGSGSGTDFTLTISRLEPEDFAVYYCQQYGDLPFTFG |
| | | | PGTKVEIK |
| 1046. | CD70_29xCD | bispecific | EVQLLESGGGLVQPGGSLRLSCAASGFTFSVYAMSWVRQAPGKGLEW |
| | 3-scFc | molecule | VSTISGSGGSTFYAESVKGRFTISRDNSKNTLYLQMNRLRAEDTAVY |
| | | | YCARHDYSNYAYFDYWGQGTLVTVSSGGGGSGGGGSGGGGSEIVLTQ |
| | | | SPGTLSLSPGERATLSCRASQSVRSSYLAWYQQKPGQAPRLLIYGAS |
| | | | SRATGIPDRFSGSGSGTDFTLTISRLEPEDFAVYYCQQYGDLPFTFG |
| | | | PGTKVEIKSGGGGSEVQLVESGGGLVQPGGSLKLSCAASGFTFNKYA |
| | | | MNWVRQAPGKGLEWVARIRSKYNNYATYYADSVKDRFTISRDDSKNT |
| | | | AYLQMNNLKTEDTAVYYCVRHGNFGNSYISYWAYWGQGTLVTVSSGG |
| | | | GGSGGGGSGGGGSQTVVTQEPSLTVSPGGTVTLTCGSSTGAVTSGNY |
| | | | PNWVQQKPGQAPRGLIGGTKFLAPGTPARFSGSLLGGKAALTLSGVQ |
| | | | PEDEAEYYCVLWYSNRWVFGGGTKLTVL |
| 1047. | CD70_29xCD | bispecific | EVQLLESGGGLVQPGGSLRLSCAASGFTFSVYAMSWVRQAPGKGLEW |
| | 3-scFc | HLE | VSTISGSGGSTFYAESVKGRFTISRDNSKNTLYLQMNRLRAEDTAVY |
| | | molecule | YCARHDYSNYAYFDYWGQGTLVTVSSGGGGSGGGGSGGGGSEIVLTQ |
| | | | SPGTLSLSPGERATLSCRASQSVRSSYLAWYQQKPGQAPRLLIYGAS |
| | | | SRATGIPDRFSGSGSGTDFTLTISRLEPEDFAVYYCQQYGDLPFTFG |
| | | | PGTKVEIKSGGGGSEVQLVESGGGLVQPGGSLKLSCAASGFTFNKYA |
| | | | MNWVRQAPGKGLEWVARIRSKYNNYATYYADSVKDRFTISRDDSKNT |
| | | | AYLQMNNLKTEDTAVYYCVRHGNFGNSYISYWAYWGQGTLVTVSSGG |
| | | | GGSGGGGSGGGGSQTVVTQEPSLTVSPGGTVTLTCGSSTGAVTSGNY |
| | | | PNWVQQKPGQAPRGLIGGTKFLAPGTPARFSGSLLGGKAALTLSGVQ |
| | | | PEDEAEYYCVLWYSNRWVFGGGTKLTVLGGGGDKTHTCPPCPAPELL |
| | | | GGPSVFLFPPKPKDTLMISRTPEVTCVVVDVSHEDPEVKFNWYVDGV |
| | | | EVHNAKTKPCEEQYGSTYRCVSVLTVLHQDWLNGKEYKCKVSNKALP |
| | | | APIEKTISKAKGQPREPQVYTLPPSREEMTKNQVSLTCLVKGFYPSD |
| | | | IAVEWESNGQPENNYKTTPPVLDSDGSFFLYSKLTVDKSRWQQGNVF |
| | | | SCSVMHEALHNHYTQKSLSLSPGKGGGGSGGGGSGGGGSGGGGSGGG |
| | | | GSGGGGSDKTHTCPPCPAPELLGGPSVFLFPPKPKDTLMISRTPEVT |
| | | | CVVVDVSHEDPEVKFNWYVDGVEVHNAKTKPCEEQYGSTYRCVSVLT |
| | | | VLHQDWLNGKEYKCKVSNKALPAPIEKTISKAKGQPREPQVYTLPPS |
| | | | REEMTKNQVSLTCLVKGFYPSDIAVEWESNGQPENNYKTTPPVLDSD |
| | | | GSFFLYSKLTVDKSRWQQGNVFSCSVMHEALHNHYTQKSLSLSPGK |
| 1048. | CD70_30_CC | VH CDR1 | SYGMH |
| | xCD3-scFc | | |
| 1049. | CD70_30_CC | VH CDR2 | VISYEGSNKYYAESVKG |
| | xCD3-scFc | | |
| 1050. | CD70_30_CC | VH CDR3 | GRYYGSGNYNHGMDV |
| | xCD3-scFc | | |
| 1051. | CD70_30_CC | VL CDR1 | RASQSISSYLN |
| | xCD3-scFc | | |
| 1052. | CD70_30_CC | VL CDR2 | AASSLQS |
| | xCD3-scFc | | |
| 1053. | CD70_30_CC | VL CDR3 | QQSYSTPFT |
| | xCD3-scFc | | |
| 1054. | CD70_30_CC | VH | QVQLVESGGGVVQPGRSLRLSCAASGFMFSSYGMHWVRQAPGKCLEW |
| | xCD3-scFc | | VAVISYEGSNKYYAESVKGRFTISRDNSKNTLYLQMNSLRAEDTAVY |
| | | | YCARGRYYGSGNYNHGMDVWGQGTTVTVSS |
| 1055. | CD70_30_CC | VL | DIQMTQSPSSLSASVGDRVTITCRASQSISSYLNWYQQKPGKAPKLL |
| | xCD3-scFc | | IYAASSLQSGVPSRFSGRGSGTDFTLTISSLQPEDFATYYCQQSYST |
| | | | PFTFGCGTKVEIK |
| 1056. | CD70_30_CC | scFv | QVQLVESGGGVVQPGRSLRLSCAASGFMFSSYGMHWVRQAPGKCLEW |
| | xCD3-scFc | | VAVISYEGSNKYYAESVKGRFTISRDNSKNTLYLQMNSLRAEDTAVY |
| | | | YCARGRYYGSGNYNHGMDVWGQGTTVTVSSGGGGSGGGGSGGGGSDI |
| | | | QMTQSPSSLSASVGDRVTITCRASQSISSYLNWYQQKPGKAPKLLIY |
| | | | AASSLQSGVPSRFSGRGSGTDFTLTISSLQPEDFATYYCQQSYSTPF |
| | | | TFGCGTKVEIK |
| 1057. | CD70_30_CC | bispecific | QVQLVESGGGVVQPGRSLRLSCAASGFMFSSYGMHWVRQAPGKCLEW |
| | xCD3-scFc | molecule | VAVISYEGSNKYYAESVKGRFTISRDNSKNTLYLQMNSLRAEDTAVY |
| | | | YCARGRYYGSGNYNHGMDVWGQGTTVTVSSGGGGSGGGGSGGGGSDI |
| | | | QMTQSPSSLSASVGDRVTITCRASQSISSYLNWYQQKPGKAPKLLIY |
| | | | AASSLQSGVPSRFSGRGSGTDFTLTISSLQPEDFATYYCQQSYSTPF |
| | | | TFGCGTKVEIKSGGGGSEVQLVESGGGLVQPGGSLKLSCAASGFTFN |
| | | | KYAMNWVRQAPGKGLEWVARIRSKYNNYATYYADSVKDRFTISRDDS |
| | | | KNTAYLQMNNLKTEDTAVYYCVRHGNFGNSYISYWAYWGQGTLVTVS |
| | | | SGGGGSGGGGSGGGGSQTVVTQEPSLTVSPGGTVTLTCGSSTGAVTS |
| | | | GNYPNWVQQKPGQAPRGLIGGTKFLAPGTPARFSGSLLGGKAALTLS |
| | | | GVQPEDEAEYYCVLWYSNRWVFGGGTKLTVL |
| 1058. | CD70_30_CC | bispecific | QVQLVESGGGVVQPGRSLRLSCAASGFMFSSYGMHWVRQAPGKCLEW |
| | xCD3-scFc | HLE | VAVISYEGSNKYYAESVKGRFTISRDNSKNTLYLQMNSLRAEDTAVY |
| | | molecule | YCARGRYYGSGNYNHGMDVWGQGTTVTVSSGGGGSGGGGSGGGGSDI |
| | | | QMTQSPSSLSASVGDRVTITCRASQSISSYLNWYQQKPGKAPKLLIY |
| | | | AASSLQSGVPSRFSGRGSGTDFTLTISSLQPEDFATYYCQQSYSTPF |
| | | | TFGCGTKVEIKSGGGGSEVQLVESGGGLVQPGGSLKLSCAASGFTFN |
| | | | KYAMNWVRQAPGKGLEWVARIRSKYNNYATYYADSVKDRFTISRDDS |
| | | | KNTAYLQMNNLKTEDTAVYYCVRHGNFGNSYISYWAYWGQGTLVTVS |
| | | | SGGGGSGGGGSGGGGSQTVVTQEPSLTVSPGGTVTLTCGSSTGAVTS |
| | | | GNYPNWVQQKPGQAPRGLIGGTKFLAPGTPARFSGSLLGGKAALTLS |
| | | | GVQPEDEAEYYCVLWYSNRWVFGGGTKLTVLGGGGDKTHTCPPCPAP |
| | | | ELLGGPSVFLFPPKPKDTLMISRTPEVTCVVVDVSHEDPEVKFNWYV |
| | | | DGVEVHNAKTKPCEEQYGSTYRCVSVLTVLHQDWLNGKEYKCKVSNK |
| | | | ALPAPIEKTISKAKGQPREPQVYTLPPSREEMTKNQVSLTCLVKGFY |
| | | | PSDIAVEWESNGQPENNYKTTPPVLDSDGSFFLYSKLTVDKSRWQQG |
| | | | NVFSCSVMHEALHNHYTQKSLSLSPGKGGGGSGGGGSGGGGSGGGGS |
| | | | GGGGSGGGGSDKTHTCPPCPAPELLGGPSVFLFPPKPKDTLMISRTP |
| | | | EVTCVVVDVSHEDPEVKFNWYVDGVEVHNAKTKPCEEQYGSTYRCVS |
| | | | VLTVLHQDWLNGKEYKCKVSNKALPAPIEKTISKAKGQPREPQVYTL |
| | | | PPSREEMTKNQVSLTCLVKGFYPSDIAVEWESNGQPENNYKTTPPVL |
| | | | DSDGSFFLYSKLTVDKSRWQQGNVFSCSVMHEALHNHYTQKSLSLSP |
| | | | GK |
| 1059. | CD70_30xCD | VH | QVQLVESGGGVVQPGRSLRLSCAASGFMFSSYGMHWVRQAPGKGLEW |
| | 3-scFc | | VAVISYEGSNKYYAESVKGRFTISRDNSKNTLYLQMNSLRAEDTAVY |
| | | | YCARGRYYGSGNYNHGMDVWGQGTTVTVSS |
| 1060. | CD70_30xCD | VL | DIQMTQSPSSLSASVGDRVTITCRASQSISSYLNWYQQKPGKAPKLL |
| | 3-scFc | | IYAASSLQSGVPSRFSGRGSGTDFTLTISSLQPEDFATYYCQQSYST |
| | | | PFTFGPGTKVEIK |
| 1061. | CD70_30xCD | scFv | QVQLVESGGGVVQPGRSLRLSCAASGFMFSSYGMHWVRQAPGKGLEW |
| | 3-scFc | | VAVISYEGSNKYYAESVKGRFTISRDNSKNTLYLQMNSLRAEDTAVY |
| | | | YCARGRYYGSGNYNHGMDVWGQGTTVTVSSGGGGSGGGGSGGGGSDI |
| | | | QMTQSPSSLSASVGDRVTITCRASQSISSYLNWYQQKPGKAPKLLIY |
| | | | AASSLQSGVPSRFSGRGSGTDFTLTISSLQPEDFATYYCQQSYSTPF |
| | | | TFGPGTKVEIK |
| 1062. | CD70_30xCD | bispecific | QvQLvESGGGVVQPGRSLRLSCAASGFMFSSYGMHWVRQAPGKGLEW |
| | 3-scFc | molecule | VAVISYEGSNKYYAESVKGRFTISRDNSKNTLYLQMNSLRAEDTAVY |
| | | | YCARGRYYGSGNYNHGMDVWGQGTTVTVSSGGGGSGGGGSGGGGSDI |
| | | | QMTQSPSSLSASVGDRVTITCRASQSISSYLNWYQQKPGKAPKLLIY |
| | | | AASSLQSGVPSRFSGRGSGTDFTLTISSLQPEDFATYYCQQSYSTPF |
| | | | TFGPGTKVEIKSGGGGSEVQLVESGGGLVQPGGSLKLSCAASGFTFN |
| | | | KYAMNWVRQAPGKGLEWVARIRSKYNNYATYYADSVKDRFTISRDDS |
| | | | KNTAYLQMNNLKTEDTAVYYCVRHGNFGNSYISYWAYWGQGTLVTVS |
| | | | SGGGGSGGGGSGGGGSQTVVTQEPSLTVSPGGTVTLTCGSSTGAVTS |
| | | | GNYPNWVQQKPGQAPRGLIGGTKFLAPGTPARFSGSLLGGKAALTLS |
| | | | GVQPEDEAEYYCVLWYSNRWVFGGGTKLTVL |
| 1063. | CD70_30xCD | bispecific | QvQLvESGGGVVQPGRSLRLSCAASGFMFSSYGMHWVRQAPGKGLEW |
| | 3-scFc | HLE | VAVISYEGSNKYYAESVKGRFTISRDNSKNTLYLQMNSLRAEDTAVY |
| | | molecule | YCARGRYYGSGNYNHGMDVWGQGTTVTVSSGGGGSGGGGSGGGGSDI |
| | | | QMTQSPSSLSASVGDRVTITCRASQSISSYLNWYQQKPGKAPKLLIY |
| | | | AASSLQSGVPSRFSGRGSGTDFTLTISSLQPEDFATYYCQQSYSTPF |
| | | | TFGPGTKVEIKSGGGGSEVQLVESGGGLVQPGGSLKLSCAASGFTFN |
| | | | KYAMNWVRQAPGKGLEWVARIRSKYNNYATYYADSVKDRFTISRDDS |
| | | | KNTAYLQMNNLKTEDTAVYYCVRHGNFGNSYISYWAYWGQGTLVTVS |
| | | | SGGGGSGGGGSGGGGSQTVVTQEPSLTVSPGGTVTLTCGSSTGAVTS |
| | | | GNYPNWVQQKPGQAPRGLIGGTKFLAPGTPARFSGSLLGGKAALTLS |
| | | | GVQPEDEAEYYCVLWYSNRWVFGGGTKLTVLGGGGDKTHTCPPCPAP |
| | | | ELLGGPSVFLFPPKPKDTLMISRTPEVTCVVVDVSHEDPEVKFNWYV |
| | | | DGVEVHNAKTKPCEEQYGSTYRCVSVLTVLHQDWLNGKEYKCKVSNK |
| | | | ALPAPIEKTISKAKGQPREPQVYTLPPSREEMTKNQVSLTCLVKGFY |
| | | | PSDIAVEWESNGQPENNYKTTPPVLDSDGSFFLYSKLTVDKSRWQQG |
| | | | NVFSCSVMHEALHNHYTQKSLSLSPGKGGGGSGGGGSGGGGSGGGGS |
| | | | GGGGSGGGGSDKTHTCPPCPAPELLGGPSVFLFPPKPKDTLMISRTP |
| | | | EVTCVVVDVSHEDPEVKFNWYVDGVEVHNAKTKPCEEQYGSTYRCVS |
| | | | VLTVLHQDWLNGKEYKCKVSNKALPAPIEKTISKAKGQPREPQVYTL |
| | | | PPSREEMTKNQVSLTCLVKGFYPSDIAVEWESNGQPENNYKTTPPVL |
| | | | DSDGSFFLYSKLTVDKSRWQQGNVFSCSVMHEALHNHYTQKSLSLSP |
| | | | GK |
| 1064. | CD70_31_CC | VH CDR1 | SYGMH |
| | xCD3-scFc | | |
| 1065. | CD70_31_CC | VH CDR2 | VTWYDASNKYYGDAVKG |
| | xCD3-scFc | | |
| 1066. | CD70_31_CC | VH CDR3 | DLLRGVKGYAMDV |
| | xCD3-scFc | | |
| 1067. | CD70_31_CC | VL CDR1 | RASQSLRRIYLA |
| | xCD3-scFc | | |
| 1068. | CD70_31_CC | VL CDR2 | DVFDRAT |
| | xCD3-scFc | | |
| 1069. | CD70_31_CC | VL CDR3 | QQYSESPFT |
| | xCD3-scFc | | |
| 1070. | CD70_31_CC | VH | QVQLVESGGGVVQPGRSLRLSCAASGFTFSSYGMHWVRQAPGKCLEW |
| | xCD3-scFc | | VAVTWYDASNKYYGDAVKGRFTISRDNSKNTLYLQMNSLRAEDTAVY |
| | | | YCARDLLRGVKGYAMDVWGQGTTVTVSS |
| 1071. | CD70_31_CC | VL | EIVLTQSPGTLSLSPGERATLSCRASQSLRRIYLAWYQQKPGQAPRL |
| | xCD3-scFc | | LIYDVFDRATGIPDRFSGGGSGTDFTLTISRLEPEDFAVYYCQQYSE |
| | | | SPFTFGCGTKVDIK |
| 1072. | CD70_31_CC | scFv | QVQLVESGGGVVQPGRSLRLSCAASGFTFSSYGMHWVRQAPGKCLEW |
| | xCD3-scFc | | VAVTWYDASNKYYGDAVKGRFTISRDNSKNTLYLQMNSLRAEDTAVY |
| | | | YCARDLLRGVKGYAMDVWGQGTTVTVSSGGGGSGGGGSGGGGSEIVL |
| | | | TQSPGTLSLSPGERATLSCRASQSLRRIYLAWYQQKPGQAPRLLIYD |
| | | | VFDRATGIPDRFSGGGSGTDFTLTISRLEPEDFAVYYCQQYSESPFT |
| | | | FGCGTKVDIK |
| 1073. | CD70_31_CC | bispecific | QvQLvESGGGVVQPGRSLRLSCAASGFTFSSYGMHWVRQAPGKCLEW |
| | xCD3-scFc | molecule | VAVTWYDASNKYYGDAVKGRFTISRDNSKNTLYLQMNSLRAEDTAVY |
| | | | YCARDLLRGVKGYAMDVWGQGTTVTVSSGGGGSGGGGSGGGGSEIVL |
| | | | TQSPGTLSLSPGERATLSCRASQSLRRIYLAWYQQKPGQAPRLLIYD |
| | | | VFDRATGIPDRFSGGGSGTDFTLTISRLEPEDFAVYYCQQYSESPFT |
| | | | FGCGTKVDIKSGGGGSEVQLVESGGGLVQPGGSLKLSCAASGFTFNK |
| | | | YAMNWVRQAPGKGLEWVARIRSKYNNYATYYADSVKDRFTISRDDSK |
| | | | NTAYLQMNNLKTEDTAVYYCVRHGNFGNSYISYWAYWGQGTLVTVSS |
| | | | GGGGSGGGGSGGGGSQTVVTQEPSLTVSPGGTVTLTCGSSTGAVTSG |
| | | | NYPNWVQQKPGQAPRGLIGGTKFLAPGTPARFSGSLLGGKAALTLSG |
| | | | VQPEDEAEYYCVLWYSNRWVFGGGTKLTVL |
| 1074. | CD70_31_CC | bispecific | QvQLvESGGGVVQPGRSLRLSCAASGFTFSSYGMHWVRQAPGKCLEW |
| | xCD3-scFc | HLE | VAVTWYDASNKYYGDAVKGRFTISRDNSKNTLYLQMNSLRAEDTAVY |
| | | molecule | YCARDLLRGVKGYAMDVWGQGTTVTVSSGGGGSGGGGSGGGGSEIVL |
| | | | TQSPGTLSLSPGERATLSCRASQSLRRIYLAWYQQKPGQAPRLLIYD |
| | | | VFDRATGIPDRFSGGGSGTDFTLTISRLEPEDFAVYYCQQYSESPFT |
| | | | FGCGTKVDIKSGGGGSEVQLVESGGGLVQPGGSLKLSCAASGFTFNK |
| | | | YAMNWVRQAPGKGLEWVARIRSKYNNYATYYADSVKDRFTISRDDSK |
| | | | NTAYLQMNNLKTEDTAVYYCVRHGNFGNSYISYWAYWGQGTLVTVSS |
| | | | GGGGSGGGGSGGGGSQTVVTQEPSLTVSPGGTVTLTCGSSTGAVTSG |
| | | | NYPNWVQQKPGQAPRGLIGGTKFLAPGTPARFSGSLLGGKAALTLSG |
| | | | VQPEDEAEYYCVLWYSNRWVFGGGTKLTVLGGGGDKTHTCPPCPAPE |
| | | | LLGGPSVFLFPPKPKDTLMISRTPEVTCVVVDVSHEDPEVKFNWYVD |
| | | | GVEVHNAKTKPCEEQYGSTYRCVSVLTVLHQDWLNGKEYKCKVSNKA |
| | | | LPAPIEKTISKAKGQPREPQVYTLPPSREEMTKNQVSLTCLVKGFYP |
| | | | SDIAVEWESNGQPENNYKTTPPVLDSDGSFFLYSKLTVDKSRWQQGN |
| | | | VFSCSVMHEALHNHYTQKSLSLSPGKGGGGSGGGGSGGGGSGGGGSG |
| | | | GGGSGGGGSDKTHTCPPCPAPELLGGPSVFLFPPKPKDTLMISRTPE |
| | | | VTCVVVDVSHEDPEVKFNWYVDGVEVHNAKTKPCEEQYGSTYRCVSV |
| | | | LTVLHQDWLNGKEYKCKVSNKALPAPIEKTISKAKGQPREPQVYTLP |
| | | | PSREEMTKNQVSLTCLVKGFYPSDIAVEWESNGQPENNYKTTPPVLD |
| | | | SDGSFFLYSKLTVDKSRWQQGNVFSCSVMHEALHNHYTQKSLSLSPG |
| | | | K |
| 1075. | CD70_31xCD | VH | QVQLVESGGGVVQPGRSLRLSCAASGFTFSSYGMHWVRQAPGKGLEW |
| | 3-scFc | | VAVTWYDASNKYYGDAVKGRFTISRDNSKNTLYLQMNSLRAEDTAVY |
| | | | YCARDLLRGVKGYAMDVWGQGTTVTVSS |
| 1076. | CD70_31xCD | VL | EIVLTQSPGTLSLSPGERATLSCRASQSLRRIYLAWYQQKPGQAPRL |
| | 3-scFc | | LIYDVFDRATGIPDRFSGGGSGTDFTLTISRLEPEDFAVYYCQQYSE |
| | | | SPFTFGPGTKVDIK |
| 1077. | CD70_31xCD | scFv | QVQLVESGGGVVQPGRSLRLSCAASGFTFSSYGMHWVRQAPGKGLEW |
| | 3-scFc | | VAVTWYDASNKYYGDAVKGRFTISRDNSKNTLYLQMNSLRAEDTAVY |
| | | | YCARDLLRGVKGYAMDVWGQGTTVTVSSGGGGSGGGGSGGGGSEIVL |
| | | | TQSPGTLSLSPGERATLSCRASQSLRRIYLAWYQQKPGQAPRLLIYD |
| | | | VFDRATGIPDRFSGGGSGTDFTLTISRLEPEDFAVYYCQQYSESPFT |
| | | | FGPGTKVDIK |
| 1078. | CD70_31xCD | bispecific | QVQLVESGGGVVQPGRSLRLSCAASGFTFSSYGMHWVRQAPGKGLEW |
| | 3-scFc | molecule | VAVTWYDASNKYYGDAVKGRFTISRDNSKNTLYLQMNSLRAEDTAVY |
| | | | YCARDLLRGVKGYAMDVWGQGTTVTVSSGGGGSGGGGSGGGGSEIVL |
| | | | TQSPGTLSLSPGERATLSCRASQSLRRIYLAWYQQKPGQAPRLLIYD |
| | | | VFDRATGIPDRFSGGGSGTDFTLTISRLEPEDFAVYYCQQYSESPFT |
| | | | FGPGTKVDIKSGGGGSEVQLVESGGGLVQPGGSLKLSCAASGFTFNK |
| | | | YAMNWVRQAPGKGLEWVARIRSKYNNYATYYADSVKDRFTISRDDSK |
| | | | NTAYLQMNNLKTEDTAVYYCVRHGNFGNSYISYWAYWGQGTLVTVSS |
| | | | GGGGSGGGGSGGGGSQTVVTQEPSLTVSPGGTVTLTCGSSTGAVTSG |
| | | | NYPNWVQQKPGQAPRGLIGGTKFLAPGTPARFSGSLLGGKAALTLSG |
| | | | VQPEDEAEYYCVLWYSNRWVFGGGTKLTVL |
| 1079. | CD70_31xCD | bispecific | QvQLvESGGGVVQPGRSLRLSCAASGFTFSSYGMHWVRQAPGKGLEW |
| | 3-scFc | HLE | VAVTWYDASNKYYGDAVKGRFTISRDNSKNTLYLQMNSLRAEDTAVY |
| | | molecule | YCARDLLRGVKGYAMDVWGQGTTVTVSSGGGGSGGGGSGGGGSEIVL |
| | | | TQSPGTLSLSPGERATLSCRASQSLRRIYLAWYQQKPGQAPRLLIYD |
| | | | VFDRATGIPDRFSGGGSGTDFTLTISRLEPEDFAVYYCQQYSESPFT |
| | | | FGPGTKVDIKSGGGGSEVQLVESGGGLVQPGGSLKLSCAASGFTFNK |
| | | | YAMNWVRQAPGKGLEWVARIRSKYNNYATYYADSVKDRFTISRDDSK |
| | | | NTAYLQMNNLKTEDTAVYYCVRHGNFGNSYISYWAYWGQGTLVTVSS |
| | | | GGGGSGGGGSGGGGSQTVVTQEPSLTVSPGGTVTLTCGSSTGAVTSG |
| | | | NYPNWVQQKPGQAPRGLIGGTKFLAPGTPARFSGSLLGGKAALTLSG |
| | | | VQPEDEAEYYCVLWYSNRWVFGGGTKLTVLGGGGDKTHTCPPCPAPE |
| | | | LLGGPSVFLFPPKPKDTLMISRTPEVTCVVVDVSHEDPEVKFNWYVD |
| | | | GVEVHNAKTKPCEEQYGSTYRCVSVLTVLHQDWLNGKEYKCKVSNKA |
| | | | LPAPIEKTISKAKGQPREPQVYTLPPSREEMTKNQVSLTCLVKGFYP |
| | | | SDIAVEWESNGQPENNYKTTPPVLDSDGSFFLYSKLTVDKSRWQQGN |
| | | | VFSCSVMHEALHNHYTQKSLSLSPGKGGGGSGGGGSGGGGSGGGGSG |
| | | | GGGSGGGGSDKTHTCPPCPAPELLGGPSVFLFPPKPKDTLMISRTPE |
| | | | VTCVVVDVSHEDPEVKFNWYVDGVEVHNAKTKPCEEQYGSTYRCVSV |
| | | | LTVLHQDWLNGKEYKCKVSNKALPAPIEKTISKAKGQPREPQVYTLP |
| | | | PSREEMTKNQVSLTCLVKGFYPSDIAVEWESNGQPENNYKTTPPVLD |
| | | | SDGSFFLYSKLTVDKSRWQQGNVFSCSVMHEALHNHYTQKSLSLSPG |
| | | | K |
| 1080. | CD70_32_CC | VH CDR1 | SYGIS |
| | xCD3-scFc | | |
| 1081. | CD70_32_CC | VH CDR2 | WISAYQGYTHYAQKLQG |
| | xCD3-scFc | | |
| 1082. | CD70_32_CC | VH CDR3 | DYGGNDYYGMDV |
| | xCD3-scFc | | |
| 1083. | CD70_32_CC | VL CDR1 | SGSSSNIGINYVY |
| | xCD3-scFc | | |
| 1084. | CD70_32_CC | VL CDR2 | RSDQRPS |
| | xCD3-scFc | | |
| 1085. | CD70_32_CC | VL CDR3 | AAFDESLSGVV |
| | xCD3-scFc | | |
| 1086. | CD70_32_CC | VH | QVQLVQSGAEVKKPGASVKVSCKASGYTFTSYGISWVRQAPGQCLEW |
| | xCD3-scFc | | MGWISAYQGYTHYAQKLQGRVTMTTDTSTSTAYMELRSLRSDDTAVY |
| | | | YCARDYGGNDYYGMDVWGQGTTVTVSS |
| 1087. | CD70_32_CC | VL | QSVLTQPPSASGTPGQRVTISCSGSSSNIGINYVYWYQQLPGTAPKL |
| | xCD3-scFc | | LIYRSDQRPSGVPDRFSGSKSGTSASLALSGLRSEDEADYYCAAFDE |
| | | | SLSGVVFGCGTKLTVL |
| 1088. | CD70_32_CC | scFv | QVQLVQSGAEVKKPGASVKVSCKASGYTFTSYGISWVRQAPGQCLEW |
| | xCD3-scFc | | MGWISAYQGYTHYAQKLQGRVTMTTDTSTSTAYMELRSLRSDDTAVY |
| | | | YCARDYGGNDYYGMDVWGQGTTVTVSSGGGGSGGGGSGGGGSQSVLT |
| | | | QPPSASGTPGQRVTISCSGSSSNIGINYVYWYQQLPGTAPKLLIYRS |
| | | | DQRPSGVPDRFSGSKSGTSASLALSGLRSEDEADYYCAAFDESLSGV |
| | | | VFGCGTKLTVL |
| 1089. | CD70_32_CC | bispecific | QVQLVQSGAEVKKPGASVKVSCKASGYTFTSYGISWVRQAPGQCLEW |
| | xCD3-scFc | molecule | MGWISAYQGYTHYAQKLQGRVTMTTDTSTSTAYMELRSLRSDDTAVY |
| | | | YCARDYGGNDYYGMDVWGQGTTVTVSSGGGGSGGGGSGGGGSQSVLT |
| | | | QPPSASGTPGQRVTISCSGSSSNIGINYVYWYQQLPGTAPKLLIYRS |
| | | | DQRPSGVPDRFSGSKSGTSASLALSGLRSEDEADYYCAAFDESLSGV |
| | | | VFGCGTKLTVLSGGGGSEVQLVESGGGLVQPGGSLKLSCAASGFTFN |
| | | | KYAMNWVRQAPGKGLEWVARIRSKYNNYATYYADSVKDRFTISRDDS |
| | | | KNTAYLQMNNLKTEDTAVYYCVRHGNFGNSYISYWAYWGQGTLVTVS |
| | | | SGGGGSGGGGSGGGGSQTVVTQEPSLTVSPGGTVTLTCGSSTGAVTS |
| | | | GNYPNWVQQKPGQAPRGLIGGTKFLAPGTPARFSGSLLGGKAALTLS |
| | | | GVQPEDEAEYYCVLWYSNRWVFGGGTKLTVL |
| 1090. | CD70_32_CC | bispecific | QVQLVQSGAEVKKPGASVKVSCKASGYTFTSYGISWVRQAPGQCLEW |
| | xCD3-scFc | HLE | MGWISAYQGYTHYAQKLQGRVTMTTDTSTSTAYMELRSLRSDDTAVY |
| | | molecule | YCARDYGGNDYYGMDVWGQGTTVTVSSGGGGSGGGGSGGGGSQSVLT |
| | | | QPPSASGTPGQRVTISCSGSSSNIGINYVYWYQQLPGTAPKLLIYRS |
| | | | DQRPSGVPDRFSGSKSGTSASLALSGLRSEDEADYYCAAFDESLSGV |
| | | | VFGCGTKLTVLSGGGGSEVQLVESGGGLVQPGGSLKLSCAASGFTFN |
| | | | KYAMNWVRQAPGKGLEWVARIRSKYNNYATYYADSVKDRFTISRDDS |
| | | | KNTAYLQMNNLKTEDTAVYYCVRHGNFGNSYISYWAYWGQGTLVTVS |
| | | | SGGGGSGGGGSGGGGSQTVVTQEPSLTVSPGGTVTLTCGSSTGAVTS |
| | | | GNYPNWVQQKPGQAPRGLIGGTKFLAPGTPARFSGSLLGGKAALTLS |
| | | | GVQPEDEAEYYCVLWYSNRWVFGGGTKLTVLGGGGDKTHTCPPCPAP |
| | | | ELLGGPSVFLFPPKPKDTLMISRTPEVTCVVVDVSHEDPEVKFNWYV |
| | | | DGVEVHNAKTKPCEEQYGSTYRCVSVLTVLHQDWLNGKEYKCKVSNK |
| | | | ALPAPIEKTISKAKGQPREPQVYTLPPSREEMTKNQVSLTCLVKGFY |
| | | | PSDIAVEWESNGQPENNYKTTPPVLDSDGSFFLYSKLTVDKSRWQQG |
| | | | NVFSCSVMHEALHNHYTQKSLSLSPGKGGGGSGGGGSGGGGSGGGGS |
| | | | GGGGSGGGGSDKTHTCPPCPAPELLGGPSVFLFPPKPKDTLMISRTP |
| | | | EVTCVVVDVSHEDPEVKFNWYVDGVEVHNAKTKPCEEQYGSTYRCVS |
| | | | VLTVLHQDWLNGKEYKCKVSNKALPAPIEKTISKAKGQPREPQVYTL |
| | | | PPSREEMTKNQVSLTCLVKGFYPSDIAVEWESNGQPENNYKTTPPVL |
| | | | DSDGSFFLYSKLTVDKSRWQQGNVFSCSVMHEALHNHYTQKSLSLSP |
| | | | GK |
| 1091. | CD70_32xCD | VH | QVQLVQSGAEVKKPGASVKVSCKASGYTFTSYGISWVRQAPGQGLEW |
| | 3-scFc | | MGWISAYQGYTHYAQKLQGRVTMTTDTSTSTAYMELRSLRSDDTAVY |
| | | | YCARDYGGNDYYGMDVWGQGTTVTVSS |
| 1092. | CD70_32xCD | VL | QSVLTQPPSASGTPGQRVTISCSGSSSNIGINYVYWYQQLPGTAPKL |
| | 3-scFc | | LIYRSDQRPSGVPDRFSGSKSGTSASLALSGLRSEDEADYYCAAFDE |
| | | | SLSGVVFGGGTKLTVL |
| 1093. | CD70_32xCD | scFv | QVQLVQSGAEVKKPGASVKVSCKASGYTFTSYGISWVRQAPGQGLEW |
| | 3-scFc | | MGWISAYQGYTHYAQKLQGRVTMTTDTSTSTAYMELRSLRSDDTAVY |
| | | | YCARDYGGNDYYGMDVWGQGTTVTVSSGGGGSGGGGSGGGGSQSVLT |
| | | | QPPSASGTPGQRVTISCSGSSSNIGINYVYWYQQLPGTAPKLLIYRS |
| | | | DQRPSGVPDRFSGSKSGTSASLALSGLRSEDEADYYCAAFDESLSGV |
| | | | VFGGGTKLTVL |
| 1094. | CD70_32xCD | bispecific | QVQLVQSGAEVKKPGASVKVSCKASGYTFTSYGISWVRQAPGQGLEW |
| | 3-scFc | molecule | MGWISAYQGYTHYAQKLQGRVTMTTDTSTSTAYMELRSLRSDDTAVY |
| | | | YCARDYGGNDYYGMDVWGQGTTVTVSSGGGGSGGGGSGGGGSQSVLT |
| | | | QPPSASGTPGQRVTISCSGSSSNIGINYVYWYQQLPGTAPKLLIYRS |
| | | | DQRPSGVPDRFSGSKSGTSASLALSGLRSEDEADYYCAAFDESLSGV |
| | | | VFGGGTKLTVLSGGGGSEVQLVESGGGLVQPGGSLKLSCAASGFTFN |
| | | | KYAMNWVRQAPGKGLEWVARIRSKYNNYATYYADSVKDRFTISRDDS |
| | | | KNTAYLQMNNLKTEDTAVYYCVRHGNFGNSYISYWAYWGQGTLVTVS |
| | | | SGGGGSGGGGSGGGGSQTVVTQEPSLTVSPGGTVTLTCGSSTGAVTS |
| | | | GNYPNWVQQKPGQAPRGLIGGTKFLAPGTPARFSGSLLGGKAALTLS |
| | | | GVQPEDEAEYYCVLWYSNRWVFGGGTKLTVL |
| 1095. | CD70_32xCD | bispecific | QVQLVQSGAEVKKPGASVKVSCKASGYTFTSYGISWVRQAPGQGLEW |
| | 3-scFc | HLE | MGWISAYQGYTHYAQKLQGRVTMTTDTSTSTAYMELRSLRSDDTAVY |
| | | molecule | YCARDYGGNDYYGMDVWGQGTTVTVSSGGGGSGGGGSGGGGSQSVLT |
| | | | QPPSASGTPGQRVTISCSGSSSNIGINYVYWYQQLPGTAPKLLIYRS |
| | | | DQRPSGVPDRFSGSKSGTSASLALSGLRSEDEADYYCAAFDESLSGV |
| | | | VFGGGTKLTVLSGGGGSEVQLVESGGGLVQPGGSLKLSCAASGFTFN |
| | | | KYAMNWVRQAPGKGLEWVARIRSKYNNYATYYADSVKDRFTISRDDS |
| | | | KNTAYLQMNNLKTEDTAVYYCVRHGNFGNSYISYWAYWGQGTLVTVS |
| | | | SGGGGSGGGGSGGGGSQTVVTQEPSLTVSPGGTVTLTCGSSTGAVTS |
| | | | GNYPNWVQQKPGQAPRGLIGGTKFLAPGTPARFSGSLLGGKAALTLS |
| | | | GVQPEDEAEYYCVLWYSNRWVFGGGTKLTVLGGGGDKTHTCPPCPAP |
| | | | ELLGGPSVFLFPPKPKDTLMISRTPEVTCVVVDVSHEDPEVKFNWYV |
| | | | DGVEVHNAKTKPCEEQYGSTYRCVSVLTVLHQDWLNGKEYKCKVSNK |
| | | | ALPAPIEKTISKAKGQPREPQVYTLPPSREEMTKNQVSLTCLVKGFY |
| | | | PSDIAVEWESNGQPENNYKTTPPVLDSDGSFFLYSKLTVDKSRWQQG |
| | | | NVFSCSVMHEALHNHYTQKSLSLSPGKGGGGSGGGGSGGGGSGGGGS |
| | | | GGGGSGGGGSDKTHTCPPCPAPELLGGPSVFLFPPKPKDTLMISRTP |
| | | | EVTCVVVDVSHEDPEVKFNWYVDGVEVHNAKTKPCEEQYGSTYRCVS |
| | | | VLTVLHQDWLNGKEYKCKVSNKALPAPIEKTISKAKGQPREPQVYTL |
| | | | PPSREEMTKNQVSLTCLVKGFYPSDIAVEWESNGQPENNYKTTPPVL |
| | | | DSDGSFFLYSKLTVDKSRWQQGNVFSCSVMHEALHNHYTQKSLSLSP |
| | | | GK |
| 1096. | CD70_33_CC | VH CDR1 | YYGMH |
| | xCD3-scFc | | |
| 1097. | CD70_33_CC | VH CDR2 | VIWYDASNKYYADAVKG |
| | xCD3-scFc | | |
| 1098. | CD70_33_CC | VH CDR3 | DREMGSRGDFDY |
| | xCD3-scFc | | |
| 1099. | CD70_33_CC | VL CDR1 | RASQGINNYLA |
| | xCD3-scFc | | |
| 1100. | CD70_33_CC | VL CDR2 | AVSILQS |
| | xCD3-scFc | | |
| 1101. | CD70_33_CC | VL CDR3 | QQYNFYPFS |
| | xCD3-scFc | | |
| 1102. | CD70_33_CC | VH | QAQLVESGGGVVQPGRSLRLSCAASGFTFSYYGMHWVRQAPGKCLEW |
| | xCD3-scFc | | VAVIWYDASNKYYADAVKGRFTISRDNSKNTLYLQMNSLRAEDTAVY |
| | | | YCARDREMGSRGDFDYWGQGTLVTVSS |
| 1103. | CD70_33_CC | VL | DIQMTQSPSSLSASVGDRVTITCRASQGINNYLAWFQQKPGKAPKSL |
| | xCD3-scFc | | IYAVSILQSGVPSKFSGSGSGTDFTLTISNLQPEDFATYYCQQYNFY |
| | | | PFSFGCGTKVDIK |
| 1104. | CD70_33_CC | scFv | QAQLVESGGGVVQPGRSLRLSCAASGFTFSYYGMHWVRQAPGKCLEW |
| | xCD3-scFc | | VAVIWYDASNKYYADAVKGRFTISRDNSKNTLYLQMNSLRAEDTAVY |
| | | | YCARDREMGSRGDFDYWGQGTLVTVSSGGGGSGGGGSGGGGSDIQMT |
| | | | QSPSSLSASVGDRVTITCRASQGINNYLAWFQQKPGKAPKSLIYAVS |
| | | | ILQSGVPSKFSGSGSGTDFTLTISNLQPEDFATYYCQQYNFYPFSFG |
| | | | CGTKVDIK |
| 1105. | CD70_33_CC | bispecific | QAQLQESGGGVVQPGRSLRLSCAASGFTFSYYGMHWVRQAPGKCLEW |
| | xCD3-scFc | molecule | VAVIWYDASNKYYADAVKGRFTISRDNSKNTLYLQMNSLRAEDTAVY |
| | | | YCARDREMGSRGDFDYWGQGTLVTVSSGGGGSGGGGSGGGGSDIQMT |
| | | | QSPSSLSASVGDRVTITCRASQGINNYLAWFQQKPGKAPKSLIYAVS |
| | | | ILQSGVPSKFSGSGSGTDFTLTISNLQPEDFATYYCQQYNFYPFSFG |
| | | | CGTKVDIKSGGGGSEVQLVESGGGLVQPGGSLKLSCAASGFTFNKYA |
| | | | MNWVRQAPGKGLEWVARIRSKYNNYATYYADSVKDRFTISRDDSKNT |
| | | | AYLQMNNLKTEDTAVYYCVRHGNFGNSYISYWAYWGQGTLVTVSSGG |
| | | | GGSGGGGSGGGGSQTVVTQEPSLTVSPGGTVTLTCGSSTGAVTSGNY |
| | | | PNWVQQKPGQAPRGLIGGTKFLAPGTPARFSGSLLGGKAALTLSGVQ |
| | | | PEDEAEYYCVLWYSNRWVFGGGTKLTVL |
| 1106. | CD70_33_CC | bispecific | QAQINESGGGVVQPGRSLRLSCAASGFTFSYYGMHWVRQAPGKCLEW |
| | xCD3-scFc | HLE | VAVIWYDASNKYYADAVKGRFTISRDNSKNTLYLQMNSLRAEDTAVY |
| | | molecule | YCARDREMGSRGDFDYWGQGTLVTVSSGGGGSGGGGSGGGGSDIQMT |
| | | | QSPSSLSASVGDRVTITCRASQGINNYLAWFQQKPGKAPKSLIYAVS |
| | | | ILQSGVPSKFSGSGSGTDFTLTISNLQPEDFATYYCQQYNFYPFSFG |
| | | | CGTKVDIKSGGGGSEVQLVESGGGLVQPGGSLKLSCAASGFTFNKYA |
| | | | MNWVRQAPGKGLEWVARIRSKYNNYATYYADSVKDRFTISRDDSKNT |
| | | | AYLQMNNLKTEDTAVYYCVRHGNFGNSYISYWAYWGQGTLVTVSSGG |
| | | | GGSGGGGSGGGGSQTVVTQEPSLTVSPGGTVTLTCGSSTGAVTSGNY |
| | | | PNWVQQKPGQAPRGLIGGTKFLAPGTPARFSGSLLGGKAALTLSGVQ |
| | | | PEDEAEYYCVLWYSNRWVFGGGTKLTVLGGGGDKTHTCPPCPAPELL |
| | | | GGPSVFLFPPKPKDTLMISRTPEVTCVVVDVSHEDPEVKFNWYVDGV |
| | | | EVHNAKTKPCEEQYGSTYRCVSVLTVLHQDWLNGKEYKCKVSNKALP |
| | | | APIEKTISKAKGQPREPQVYTLPPSREEMTKNQVSLTCLVKGFYPSD |
| | | | IAVEWESNGQPENNYKTTPPVLDSDGSFFLYSKLTVDKSRWQQGNVF |
| | | | SCSVMHEALHNHYTQKSLSLSPGKGGGGSGGGGSGGGGSGGGGSGGG |
| | | | GSGGGGSDKTHTCPPCPAPELLGGPSVFLFPPKPKDTLMISRTPEVT |
| | | | CVVVDVSHEDPEVKFNWYVDGVEVHNAKTKPCEEQYGSTYRCVSVLT |
| | | | VLHQDWLNGKEYKCKVSNKALPAPIEKTISKAKGQPREPQVYTLPPS |
| | | | REEMTKNQVSLTCLVKGFYPSDIAVEWESNGQPENNYKTTPPVLDSD |
| | | | GSFFLYSKLTVDKSRWQQGNVFSCSVMHEALHNHYTQKSLSLSPGK |
| 1107. | CD70_33xCD | VH | QAQLVESGGGVVQPGRSLRLSCAASGFTFSYYGMHWVRQAPGKGLEW |
| | 3-scFc | | VAVIWYDASNKYYADAVKGRFTISRDNSKNTLYLQMNSLRAEDTAVY |
| | | | YCARDREMGSRGDFDYWGQGTLVTVSS |
| 1108. | CD70_33xCD | VL | DIQMTQSPSSLSASVGDRVTITCRASQGINNYLAWFQQKPGKAPKSL |
| | 3-scFc | | IYAVSILQSGVPSKFSGSGSGTDFTLTISNLQPEDFATYYCQQYNFY |
| | | | PFSFGQGTKVDIK |
| 1109. | CD70_33xCD | scFv | QAQLVESGGGVVQPGRSLRLSCAASGFTFSYYGMHWVRQAPGKGLEW |
| | 3-scFc | | VAVIWYDASNKYYADAVKGRFTISRDNSKNTLYLQMNSLRAEDTAVY |
| | | | YCARDREMGSRGDFDYWGQGTLVTVSSGGGGSGGGGSGGGGSDIQMT |
| | | | QSPSSLSASVGDRVTITCRASQGINNYLAWFQQKPGKAPKSLIYAVS |
| | | | ILQSGVPSKFSGSGSGTDFTLTISNLQPEDFATYYCQQYNFYPFSFG |
| | | | QGTKVDIK |
| 1110. | CD70_33xCD | bispecific | QAQLQESGGGVVQPGRSLRLSCAASGFTFSYYGMHWVRQAPGKGLEW |
| | 3-scFc | molecule | VAVIWYDASNKYYADAVKGRFTISRDNSKNTLYLQMNSLRAEDTAVY |
| | | | YCARDREMGSRGDFDYWGQGTLVTVSSGGGGSGGGGSGGGGSDIQMT |
| | | | QSPSSLSASVGDRVTITCRASQGINNYLAWFQQKPGKAPKSLIYAVS |
| | | | ILQSGVPSKFSGSGSGTDFTLTISNLQPEDFATYYCQQYNFYPFSFG |
| | | | QGTKVDIKSGGGGSEVQLVESGGGLVQPGGSLKLSCAASGFTFNKYA |
| | | | MNWVRQAPGKGLEWVARIRSKYNNYATYYADSVKDRFTISRDDSKNT |
| | | | AYLQMNNLKTEDTAVYYCVRHGNFGNSYISYWAYWGQGTLVTVSSGG |
| | | | GGSGGGGSGGGGSQTVVTQEPSLTVSPGGTVTLTCGSSTGAVTSGNY |
| | | | PNWVQQKPGQAPRGLIGGTKFLAPGTPARFSGSLLGGKAALTLSGVQ |
| | | | PEDEAEYYCVLWYSNRWVFGGGTKLTVL |
| 1111. | CD70_33xCD | bispecific | QAQINESGGGVVQPGRSLRLSCAASGFTFSYYGMHWVRQAPGKGLEW |
| | 3-scFc | HLE | VAVIWYDASNKYYADAVKGRFTISRDNSKNTLYLQMNSLRAEDTAVY |
| | | molecule | YCARDREMGSRGDFDYWGQGTLVTVSSGGGGSGGGGSGGGGSDIQMT |
| | | | QSPSSLSASVGDRVTITCRASQGINNYLAWFQQKPGKAPKSLIYAVS |
| | | | ILQSGVPSKFSGSGSGTDFTLTISNLQPEDFATYYCQQYNFYPFSFG |
| | | | QGTKVDIKSGGGGSEVQLVESGGGLVQPGGSLKLSCAASGFTFNKYA |
| | | | MNWVRQAPGKGLEWVARIRSKYNNYATYYADSVKDRFTISRDDSKNT |
| | | | AYLQMNNLKTEDTAVYYCVRHGNFGNSYISYWAYWGQGTLVTVSSGG |
| | | | GGSGGGGSGGGGSQTVVTQEPSLTVSPGGTVTLTCGSSTGAVTSGNY |
| | | | PNWVQQKPGQAPRGLIGGTKFLAPGTPARFSGSLLGGKAALTLSGVQ |
| | | | PEDEAEYYCVLWYSNRWVFGGGTKLTVLGGGGDKTHTCPPCPAPELL |
| | | | GGPSVFLFPPKPKDTLMISRTPEVTCVVVDVSHEDPEVKFNWYVDGV |
| | | | EVHNAKTKPCEEQYGSTYRCVSVLTVLHQDWLNGKEYKCKVSNKALP |
| | | | APIEKTISKAKGQPREPQVYTLPPSREEMTKNQVSLTCLVKGFYPSD |
| | | | IAVEWESNGQPENNYKTTPPVLDSDGSFFLYSKLTVDKSRWQQGNVF |
| | | | SCSVMHEALHNHYTQKSLSLSPGKGGGGSGGGGSGGGGSGGGGSGGG |
| | | | GSGGGGSDKTHTCPPCPAPELLGGPSVFLFPPKPKDTLMISRTPEVT |
| | | | CVVVDVSHEDPEVKFNWYVDGVEVHNAKTKPCEEQYGSTYRCVSVLT |
| | | | VLHQDWLNGKEYKCKVSNKALPAPIEKTISKAKGQPREPQVYTLPPS |
| | | | REEMTKNQVSLTCLVKGFYPSDIAVEWESNGQPENNYKTTPPVLDSD |
| | | | GSFFLYSKLTVDKSRWQQGNVFSCSVMHEALHNHYTQKSLSLSPGK |
| 1112. | CD70_34_CC | VH CDR1 | GFYWS |
| | xCD3-scFc | | |
| 1113. | CD70_34_CC | VH CDR2 | EIYHSGHATNNPSLKS |
| | xCD3-scFc | | |
| 1114. | CD70_34_CC | VH CDR3 | GGNSGYIFDY |
| | xCD3-scFc | | |
| 1115. | CD70_34_CC | VL CDR1 | RTSQYIGRYLN |
| | xCD3-scFc | | |
| 1116. | CD70_34_CC | VL CDR2 | GASTLQQ |
| | xCD3-scFc | | |
| 1117. | CD70_34_CC | VL CDR3 | QQTYSTPRT |
| | xCD3-scFc | | |
| 1118. | CD70_34_CC | VH | QVQLQQWGAGLLKPSETLSLTCAVYGGSFSGFYWSWIRQPPGKCLEW |
| | xCD3-scFc | | IGEIYHSGHATNNPSLKSRVTISLDTSKNQFSLKLNSVTAADTAVYY |
| | | | CARGGNSGYIFDYWGQGTLVTVSS |
| 1119. | CD70_34_CC | VL | DVQMTQSPSSLSASVGDRVTITCRTSQYIGRYLNWYQQKPGKAPKVL |
| | xCD3-scFc | | IYGASTLQQGVPSRFSGSGSGTDFTLTITSLQPEDFASYYCQQTYST |
| | | | PRTFGCGTKVEIK |
| 1120. | CD70_34_CC | scFv | QVQLQQWGAGLLKPSETLSLTCAVYGGSFSGFYWSWIRQPPGKCLEW |
| | xCD3-scFc | | IGEIYHSGHATNNPSLKSRVTISLDTSKNQFSLKLNSVTAADTAVYY |
| | | | CARGGNSGYIFDYWGQGTLVTVSSGGGGSGGGGSGGGGSDVQMTQSP |
| | | | SSLSASVGDRVTITCRTSQYIGRYLNWYQQKPGKAPKVLIYGASTLQ |
| | | | QGVPSRFSGSGSGTDFTLTITSLQPEDFASYYCQQTYSTPRTFGCGT |
| | | | KVEIK |
| 1121. | CD70_34_CC | bispecific | QVQLQQWGAGLLKPSETLSLTCAVYGGSFSGFYWSWIRQPPGKCLEW |
| | xCD3-scFc | molecule | IGEIYHSGHATNNPSLKSRVTISLDTSKNQFSLKLNSVTAADTAVYY |
| | | | CARGGNSGYIFDYWGQGTLVTVSSGGGGSGGGGSGGGGSDVQMTQSP |
| | | | SSLSASVGDRVTITCRTSQYIGRYLNWYQQKPGKAPKVLIYGASTLQ |
| | | | QGVPSRFSGSGSGTDFTLTITSLQPEDFASYYCQQTYSTPRTFGCGT |
| | | | KVEIKSGGGGSEVQLVESGGGLVQPGGSLKLSCAASGFTFNKYAMNW |
| | | | VRQAPGKGLEWVARIRSKYNNYATYYADSVKDRFTISRDDSKNTAYL |
| | | | QMNNLKTEDTAVYYCVRHGNFGNSYISYWAYWGQGTLVTVSSGGGGS |
| | | | GGGGSGGGGSQTVVTQEPSLTVSPGGTVTLTCGSSTGAVTSGNYPNW |
| | | | VQQKPGQAPRGLIGGTKFLAPGTPARFSGSLLGGKAALTLSGVQPED |
| | | | EAEYYCVLWYSNRWVFGGGTKLTVL |
| 1122. | CD70_34_CC | bispecific | QVQLQQWGAGLLKPSETLSLTCAVYGGSFSGFYWSWIRQPPGKCLEW |
| | xCD3-scFc | HLE | IGEIYHSGHATNNPSLKSRVTISLDTSKNQFSLKLNSVTAADTAVYY |
| | | molecule | CARGGNSGYIFDYWGQGTLVTVSSGGGGSGGGGSGGGGSDVQMTQSP |
| | | | SSLSASVGDRVTITCRTSQYIGRYLNWYQQKPGKAPKVLIYGASTLQ |
| | | | QGVPSRFSGSGSGTDFTLTITSLQPEDFASYYCQQTYSTPRTFGCGT |
| | | | KVEIKSGGGGSEVQLVESGGGLVQPGGSLKLSCAASGFTFNKYAMNW |
| | | | VRQAPGKGLEWVARIRSKYNNYATYYADSVKDRFTISRDDSKNTAYL |
| | | | QMNNLKTEDTAVYYCVRHGNFGNSYISYWAYWGQGTLVTVSSGGGGS |
| | | | GGGGSGGGGSQTVVTQEPSLTVSPGGTVTLTCGSSTGAVTSGNYPNW |
| | | | VQQKPGQAPRGLIGGTKFLAPGTPARFSGSLLGGKAALTLSGVQPED |
| | | | EAEYYCVLWYSNRWVFGGGTKLTVLGGGGDKTHTCPPCPAPELLGGP |
| | | | SVFLFPPKPKDTLMISRTPEVTCVVVDVSHEDPEVKFNWYVDGVEVH |
| | | | NAKTKPCEEQYGSTYRCVSVLTVLHQDWLNGKEYKCKVSNKALPAPI |
| | | | EKTISKAKGQPREPQVYTLPPSREEMTKNQVSLTCLVKGFYPSDIAV |
| | | | EWESNGQPENNYKTTPPVLDSDGSFFLYSKLTVDKSRWQQGNVFSCS |
| | | | VMHEALHNHYTQKSLSLSPGKGGGGSGGGGSGGGGSGGGGSGGGGSG |
| | | | GGGSDKTHTCPPCPAPELLGGPSVFLFPPKPKDTLMISRTPEVTCVV |
| | | | VDVSHEDPEVKFNWYVDGVEVHNAKTKPCEEQYGSTYRCVSVLTVLH |
| | | | QDWLNGKEYKCKVSNKALPAPIEKTISKAKGQPREPQVYTLPPSREE |
| | | | MTKNQVSLTCLVKGFYPSDIAVEWESNGQPENNYKTTPPVLDSDGSF |
| | | | FLYSKLTVDKSRWQQGNVFSCSVMHEALHNHYTQKSLSLSPGK |
| 1123. | CD70_34xCD | VH | QVQLQQWGAGLLKPSETLSLTCAVYGGSFSGFYWSWIRQPPGKGLEW |
| | 3-scFc | | IGEIYHSGHATNNPSLKSRVTISLDTSKNQFSLKLNSVTAADTAVYY |
| | | | CARGGNSGYIFDYWGQGTLVTVSS |
| 1124. | CD70_34xCD | VL | DVQMTQSPSSLSASVGDRVTITCRTSQYIGRYLNWYQQKPGKAPKVL |
| | 3-scFc | | IYGASTLQQGVPSRFSGSGSGTDFTLTITSLQPEDFASYYCQQTYST |
| | | | PRTFGQGTKVEIK |
| 1125. | CD70_34xCD | scFv | QVQLQQWGAGLLKPSETLSLTCAVYGGSFSGFYWSWIRQPPGKGLEW |
| | 3-scFc | | IGEIYHSGHATNNPSLKSRVTISLDTSKNQFSLKLNSVTAADTAVYY |
| | | | CARGGNSGYIFDYWGQGTLVTVSSGGGGSGGGGSGGGGSDVQMTQSP |
| | | | SSLSASVGDRVTITCRTSQYIGRYLNWYQQKPGKAPKVLIYGASTLQ |
| | | | QGVPSRFSGSGSGTDFTLTITSLQPEDFASYYCQQTYSTPRTFGQGT |
| | | | KVEIK |
| 1126. | CD70_34xCD | bispecific | QVQLQQWGAGLLKPSETLSLTCAVYGGSFSGFYWSWIRQPPGKGLEW |
| | 3-scFc | molecule | IGEIYHSGHATNNPSLKSRVTISLDTSKNQFSLKLNSVTAADTAVYY |
| | | | CARGGNSGYIFDYWGQGTLVTVSSGGGGSGGGGSGGGGSDVQMTQSP |
| | | | SSLSASVGDRVTITCRTSQYIGRYLNWYQQKPGKAPKVLIYGASTLQ |
| | | | QGVPSRFSGSGSGTDFTLTITSLQPEDFASYYCQQTYSTPRTFGQGT |
| | | | KVEIKSGGGGSEVQLVESGGGLVQPGGSLKLSCAASGFTFNKYAMNW |
| | | | VRQAPGKGLEWVARIRSKYNNYATYYADSVKDRFTISRDDSKNTAYL |
| | | | QMNNLKTEDTAVYYCVRHGNFGNSYISYWAYWGQGTLVTVSSGGGGS |
| | | | GGGGSGGGGSQTVVTQEPSLTVSPGGTVTLTCGSSTGAVTSGNYPNW |
| | | | VQQKPGQAPRGLIGGTKFLAPGTPARFSGSLLGGKAALTLSGVQPED |
| | | | EAEYYCVLWYSNRWVFGGGTKLTVL |
| 1127. | CD70_34xCD | bispecific | QVQLQQWGAGLLKPSETLSLTCAVYGGSFSGFYWSWIRQPPGKGLEW |
| | 3-scFc | HLE | IGEIYHSGHATNNPSLKSRVTISLDTSKNQFSLKLNSVTAADTAVYY |
| | | molecule | CARGGNSGYIFDYWGQGTLVTVSSGGGGSGGGGSGGGGSDVQMTQSP |
| | | | SSLSASVGDRVTITCRTSQYIGRYLNWYQQKPGKAPKVLIYGASTLQ |
| | | | QGVPSRFSGSGSGTDFTLTITSLQPEDFASYYCQQTYSTPRTFGQGT |
| | | | KVEIKSGGGGSEVQLVESGGGLVQPGGSLKLSCAASGFTFNKYAMNW |
| | | | VRQAPGKGLEWVARIRSKYNNYATYYADSVKDRFTISRDDSKNTAYL |
| | | | QMNNLKTEDTAVYYCVRHGNFGNSYISYWAYWGQGTLVTVSSGGGGS |
| | | | GGGGSGGGGSQTVVTQEPSLTVSPGGTVTLTCGSSTGAVTSGNYPNW |
| | | | VQQKPGQAPRGLIGGTKFLAPGTPARFSGSLLGGKAALTLSGVQPED |
| | | | EAEYYCVLWYSNRWVFGGGTKLTVLGGGGDKTHTCPPCPAPELLGGP |
| | | | SVFLFPPKPKDTLMISRTPEVTCVVVDVSHEDPEVKFNWYVDGVEVH |
| | | | NAKTKPCEEQYGSTYRCVSVLTVLHQDWLNGKEYKCKVSNKALPAPI |
| | | | EKTISKAKGQPREPQVYTLPPSREEMTKNQVSLTCLVKGFYPSDIAV |
| | | | EWESNGQPENNYKTTPPVLDSDGSFFLYSKLTVDKSRWQQGNVFSCS |
| | | | VMHEALHNHYTQKSLSLSPGKGGGGSGGGGSGGGGSGGGGSGGGGSG |
| | | | GGGSDKTHTCPPCPAPELLGGPSVFLFPPKPKDTLMISRTPEVTCVV |
| | | | VDVSHEDPEVKFNWYVDGVEVHNAKTKPCEEQYGSTYRCVSVLTVLH |
| | | | QDWLNGKEYKCKVSNKALPAPIEKTISKAKGQPREPQVYTLPPSREE |
| | | | MTKNQVSLTCLVKGFYPSDIAVEWESNGQPENNYKTTPPVLDSDGSF |
| | | | FLYSKLTVDKSRWQQGNVFSCSVMHEALHNHYTQKSLSLSPGK |
| 1128. | CD70_35_CC | VH CDR1 | TYGMH |
| | xCD3-scFc | | |
| 1129. | CD70_35_CC | VH CDR2 | VIWYEGSNKYYGESVKG |
| | xCD3-scFc | | |
| 1130. | CD70_35_CC | VH CDR3 | DNSHYYYGMDV |
| | xCD3-scFc | | |
| 1131. | CD70_35_CC | VL CDR1 | TGSSSNIGAGYDVN |
| | xCD3-scFc | | |
| 1132. | CD70_35_CC | VL CDR2 | VNNNRPS |
| | xCD3-scFc | | |
| 1133. | CD70_35_CC | VL CDR3 | NYDTSLSASV |
| | xCD3-scFc | | |
| 1134. | CD70_35_CC | VH | QVQLVESGGGVVQPGRSLRLSCAASGFTFSTYGMHWVRQAPGKCLEW |
| | xCD3-scFc | | VAVIWYEGSNKYYGESVKGRFTISRDNSKNTLYLQMNSLRAEDTAVY |
| | | | YCARDNSHYYYGMDVWGQGTTVTVSS |
| 1135. | CD70_35_CC | VL | QSVLTQPPSVSGAPGQRVTISCTGSSSNIGAGYDVNWYQQFPGTAPK |
| | xCD3-scFc | | LLIYVNNNRPSGVPDRFSGSTSGTSASLAITGLQAEDEADYYCQSYD |
| | | | TSLSASVFGCGTRLTVL |
| 1136. | CD70_35_CC | scFv | QVQLVESGGGVVQPGRSLRLSCAASGFTFSTYGMHWVRQAPGKCLEW |
| | xCD3-scFc | | VAVIWYEGSNKYYGESVKGRFTISRDNSKNTLYLQMNSLRAEDTAVY |
| | | | YCARDNSHYYYGMDVWGQGTTVTVSSGGGGSGGGGSGGGGSQSVLTQ |
| | | | PPSVSGAPGQRVTISCTGSSSNIGAGYDVNWYQQFPGTAPKLLIYVN |
| | | | NNRPSGVPDRFSGSTSGTSASLAITGLQAEDEADYYCQSYDTSLSAS |
| | | | VFGCGTRLTVL |
| 1137. | CD70_35_CC | bispecific | QVQLVESGGGVVQPGRSLRLSCAASGFTFSTYGMHWVRQAPGKCLEW |
| | xCD3-scFc | molecule | VAVIWYEGSNKYYGESVKGRFTISRDNSKNTLYLQMNSLRAEDTAVY |
| | | | YCARDNSHYYYGMDVWGQGTTVTVSSGGGGSGGGGSGGGGSQSVLTQ |
| | | | PPSVSGAPGQRVTISCTGSSSNIGAGYDVNWYQQFPGTAPKLLIYVN |
| | | | NNRPSGVPDRFSGSTSGTSASLAITGLQAEDEADYYCQSYDTSLSAS |
| | | | VFGCGTRLTVLSGGGGSEVQLVESGGGLVQPGGSLKLSCAASGFTFN |
| | | | KYAMNWVRQAPGKGLEWVARIRSKYNNYATYYADSVKDRFTISRDDS |
| | | | KNTAYLQMNNLKTEDTAVYYCVRHGNFGNSYISYWAYWGQGTLVTVS |
| | | | SGGGGSGGGGSGGGGSQTVVTQEPSLTVSPGGTVTLTCGSSTGAVTS |
| | | | GNYPNWVQQKPGQAPRGLIGGTKFLAPGTPARFSGSLLGGKAALTLS |
| | | | GVQPEDEAEYYCVLWYSNRWVFGGGTKLTVL |
| 1138. | CD70_35_CC | bispecific | QVQLVESGGGVVQPGRSLRLSCAASGFTFSTYGMHWVRQAPGKCLEW |
| | xCD3-scFc | HLE | VAVIWYEGSNKYYGESVKGRFTISRDNSKNTLYLQMNSLRAEDTAVY |
| | | molecule | YCARDNSHYYYGMDVWGQGTTVTVSSGGGGSGGGGSGGGGSQSVLTQ |
| | | | PPSVSGAPGQRVTISCTGSSSNIGAGYDVNWYQQFPGTAPKLLIYVN |
| | | | NNRPSGVPDRFSGSTSGTSASLAITGLQAEDEADYYCQSYDTSLSAS |
| | | | VFGCGTRLTVLSGGGGSEVQLVESGGGLVQPGGSLKLSCAASGFTFN |
| | | | KYAMNWVRQAPGKGLEWVARIRSKYNNYATYYADSVKDRFTISRDDS |
| | | | KNTAYLQMNNLKTEDTAVYYCVRHGNFGNSYISYWAYWGQGTLVTVS |
| | | | SGGGGSGGGGSGGGGSQTVVTQEPSLTVSPGGTVTLTCGSSTGAVTS |
| | | | GNYPNWVQQKPGQAPRGLIGGTKFLAPGTPARFSGSLLGGKAALTLS |
| | | | GVQPEDEAEYYCVLWYSNRWVFGGGTKLTVLGGGGDKTHTCPPCPAP |
| | | | ELLGGPSVFLFPPKPKDTLMISRTPEVTCVVVDVSHEDPEVKFNWYV |
| | | | DGVEVHNAKTKPCEEQYGSTYRCVSVLTVLHQDWLNGKEYKCKVSNK |
| | | | ALPAPIEKTISKAKGQPREPQVYTLPPSREEMTKNQVSLTCLVKGFY |
| | | | PSDIAVEWESNGQPENNYKTTPPVLDSDGSFFLYSKLTVDKSRWQQG |
| | | | NVFSCSVMHEALHNHYTQKSLSLSPGKGGGGSGGGGSGGGGSGGGGS |
| | | | GGGGSGGGGSDKTHTCPPCPAPELLGGPSVFLFPPKPKDTLMISRTP |
| | | | EVTCVVVDVSHEDPEVKFNWYVDGVEVHNAKTKPCEEQYGSTYRCVS |
| | | | VLTVLHQDWLNGKEYKCKVSNKALPAPIEKTISKAKGQPREPQVYTL |
| | | | PPSREEMTKNQVSLTCLVKGFYPSDIAVEWESNGQPENNYKTTPPVL |
| | | | DSDGSFFLYSKLTVDKSRWQQGNVFSCSVMHEALHNHYTQKSLSLSP |
| | | | GK |
| 1139. | CD70_35xCD | VH | QVQLVESGGGVVQPGRSLRLSCAASGFTFSTYGMHWVRQAPGKGLEW |
| | 3-scFc | | VAVIWYEGSNKYYGESVKGRFTISRDNSKNTLYLQMNSLRAEDTAVY |
| | | | YCARDNSHYYYGMDVWGQGTTVTVSS |
| 1140. | CD70_35xCD | VL | QSVLTQPPSVSGAPGQRVTISCTGSSSNIGAGYDVNWYQQFPGTAPK |
| | 3-scFc | | LLIYVNNNRPSGVPDRFSGSTSGTSASLAITGLQAEDEADYYCQSYD |
| | | | TSLSASVFGGGTRLTVL |
| 1141. | CD70_35xCD | scFv | QVQLVESGGGVVQPGRSLRLSCAASGFTFSTYGMHWVRQAPGKGLEW |
| | 3-scFc | | VAVIWYEGSNKYYGESVKGRFTISRDNSKNTLYLQMNSLRAEDTAVY |
| | | | YCARDNSHYYYGMDVWGQGTTVTVSSGGGGSGGGGSGGGGSQSVLTQ |
| | | | PPSVSGAPGQRVTISCTGSSSNIGAGYDVNWYQQFPGTAPKLLIYVN |
| | | | NNRPSGVPDRFSGSTSGTSASLAITGLQAEDEADYYCQSYDTSLSAS |
| | | | VFGGGTRLTVL |
| 1142. | CD70_35xCD | bispecific | QVQLVESGGGVVQPGRSLRLSCAASGFTFSTYGMHWVRQAPGKGLEW |
| | 3-scFc | molecule | VAVIWYEGSNKYYGESVKGRFTISRDNSKNTLYLQMNSLRAEDTAVY |
| | | | YCARDNSHYYYGMDVWGQGTTVTVSSGGGGSGGGGSGGGGSQSVLTQ |
| | | | PPSVSGAPGQRVTISCTGSSSNIGAGYDVNWYQQFPGTAPKLLIYVN |
| | | | NNRPSGVPDRFSGSTSGTSASLAITGLQAEDEADYYCQSYDTSLSAS |
| | | | VFGGGTRLTVLSGGGGSEVQLVESGGGLVQPGGSLKLSCAASGFTFN |
| | | | KYAMNWVRQAPGKGLEWVARIRSKYNNYATYYADSVKDRFTISRDDS |
| | | | KNTAYLQMNNLKTEDTAVYYCVRHGNFGNSYISYWAYWGQGTLVTVS |
| | | | SGGGGSGGGGSGGGGSQTVVTQEPSLTVSPGGTVTLTCGSSTGAVTS |
| | | | GNYPNWVQQKPGQAPRGLIGGTKFLAPGTPARFSGSLLGGKAALTLS |
| | | | GVQPEDEAEYYCVLWYSNRWVFGGGTKLTVL |
| 1143. | CD70_35xCD | bispecific | QVQLVESGGGVVQPGRSLRLSCAASGFTFSTYGMHWVRQAPGKGLEW |
| | 3-scFc | HLE | VAVIWYEGSNKYYGESVKGRFTISRDNSKNTLYLQMNSLRAEDTAVY |
| | | molecule | YCARDNSHYYYGMDVWGQGTTVTVSSGGGGSGGGGSGGGGSQSVLTQ |
| | | | PPSVSGAPGQRVTISCTGSSSNIGAGYDVNWYQQFPGTAPKLLIYVN |
| | | | NNRPSGVPDRFSGSTSGTSASLAITGLQAEDEADYYCQSYDTSLSAS |
| | | | VFGGGTRLTVLSGGGGSEVQLVESGGGLVQPGGSLKLSCAASGFTFN |
| | | | KYAMNWVRQAPGKGLEWVARIRSKYNNYATYYADSVKDRFTISRDDS |
| | | | KNTAYLQMNNLKTEDTAVYYCVRHGNFGNSYISYWAYWGQGTLVTVS |
| | | | SGGGGSGGGGSGGGGSQTVVTQEPSLTVSPGGTVTLTCGSSTGAVTS |
| | | | GNYPNWVQQKPGQAPRGLIGGTKFLAPGTPARFSGSLLGGKAALTLS |
| | | | GVQPEDEAEYYCVLWYSNRWVFGGGTKLTVLGGGGDKTHTCPPCPAP |
| | | | ELLGGPSVFLFPPKPKDTLMISRTPEVTCVVVDVSHEDPEVKFNWYV |
| | | | DGVEVHNAKTKPCEEQYGSTYRCVSVLTVLHQDWLNGKEYKCKVSNK |
| | | | ALPAPIEKTISKAKGQPREPQVYTLPPSREEMTKNQVSLTCLVKGFY |
| | | | PSDIAVEWESNGQPENNYKTTPPVLDSDGSFFLYSKLTVDKSRWQQG |
| | | | NVFSCSVMHEALHNHYTQKSLSLSPGKGGGGSGGGGSGGGGSGGGGS |
| | | | GGGGSGGGGSDKTHTCPPCPAPELLGGPSVFLFPPKPKDTLMISRTP |
| | | | EVTCVVVDVSHEDPEVKFNWYVDGVEVHNAKTKPCEEQYGSTYRCVS |
| | | | VLTVLHQDWLNGKEYKCKVSNKALPAPIEKTISKAKGQPREPQVYTL |
| | | | PPSREEMTKNQVSLTCLVKGFYPSDIAVEWESNGQPENNYKTTPPVL |
| | | | DSDGSFFLYSKLTVDKSRWQQGNVFSCSVMHEALHNHYTQKSLSLSP |
| | | | GK |
| 1144. | CD70_36_CC | VH CDR1 | TYGMH |
| | xCD3-scFc | | |
| 1145. | CD70_36_CC | VH CDR2 | VIWYEGSNKYYGESVKG |
| | xCD3-scFc | | |
| 1146. | CD70_36_CC | VH CDR3 | DNSHYYYGMDV |
| | xCD3-scFc | | |
| 1147. | CD70_36_CC | VL CDR1 | TGSSSNIGAGYDVN |
| | xCD3-scFc | | |
| 1148. | CD70_36_CC | VL CDR2 | VNNNRPS |
| | xCD3-scFc | | |
| 1149. | CD70_36_CC | VL CDR3 | QSYETSLSASV |
| | xCD3-scFc | | |
| 1150. | CD70_36_CC | VH | QVQLVESGGGVVQPGRSLRLSCAASGFTFSTYGMHWVRQAPGKCLEW |
| | xCD3-scFc | | VAVIWYEGSNKYYGESVKGRFTISRDNSKNTLYLQMNSLRAEDTAVY |
| | | | YCARDNSHYYYGMDVWGQGTLVTVSS |
| 1151. | CD70_36_CC | VL | QSVLTQPPSVSGAPGQRVTISCTGSSSNIGAGYDVNWYQQLPGTAPK |
| | xCD3-scFc | | LLIYVNNNRPSGVPDRFSGSKSGTSASLAITGLQAEDEADYYCQSYE |
| | | | TSLSASVFGCGTRLTVL |
| 1152. | CD70_36_CC | scFv | QVQLVESGGGVVQPGRSLRLSCAASGFTFSTYGMHWVRQAPGKCLEW |
| | xCD3-scFc | | VAVIWYEGSNKYYGESVKGRFTISRDNSKNTLYLQMNSLRAEDTAVY |
| | | | YCARDNSHYYYGMDVWGQGTLVTVSSGGGGSGGGGSGGGGSQSVLTQ |
| | | | PPSVSGAPGQRVTISCTGSSSNIGAGYDVNWYQQLPGTAPKLLIYVN |
| | | | NNRPSGVPDRFSGSKSGTSASLAITGLQAEDEADYYCQSYETSLSAS |
| | | | VFGCGTRLTVL |
| 1153. | CD70_36_CC | bispecific | QVQVESGGGVVQPGRSLRLSCAASGFTFSTYGMHWVRQAPGKCLEW |
| | xCD3-scFc | molecule | VAVIWYEGSNKYYGESVKGRFTISRDNSKNTLYLQMNSLRAEDTAVY |
| | | | YCARDNSHYYYGMDVWGQGTLVTVSSGGGGSGGGGSGGGGSQSVLTQ |
| | | | PPSVSGAPGQRVTISCTGSSSNIGAGYDVNWYQQLPGTAPKLLIYVN |
| | | | NNRPSGVPDRFSGSKSGTSASLAITGLQAEDEADYYCQSYETSLSAS |
| | | | VFGCGTRLTVLSGGGGSEVQLVESGGGLVQPGGSLKLSCAASGFTFN |
| | | | KYAMNWVRQAPGKGLEWVARIRSKYNNYATYYADSVKDRFTISRDDS |
| | | | KNTAYLQMNNLKTEDTAVYYCVRHGNFGNSYISYWAYWGQGTLVTVS |
| | | | SGGGGSGGGGSGGGGSQTVVTQEPSLTVSPGGTVTLTCGSSTGAVTS |
| | | | GNYPNWVQQKPGQAPRGLIGGTKFLAPGTPARFSGSLLGGKAALTLS |
| | | | GVQPEDEAEYYCVLWYSNRWVFGGGTKLTVL |
| 1154. | CD70_36_CC | bispecific | QVQLVESGGGVVQPGRSLRLSCAASGFTFSTYGMHWVRQAPGKCLEW |
| | xCD3-scFc | HLE | VAVIWYEGSNKYYGESVKGRFTISRDNSKNTLYLQMNSLRAEDTAVY |
| | | molecule | YCARDNSHYYYGMDVWGQGTLVTVSSGGGGSGGGGSGGGGSQSVLTQ |
| | | | PPSVSGAPGQRVTISCTGSSSNIGAGYDVNWYQQLPGTAPKLLIYVN |
| | | | NNRPSGVPDRFSGSKSGTSASLAITGLQAEDEADYYCQSYETSLSAS |
| | | | VFGCGTRLTVLSGGGGSEVQLVESGGGLVQPGGSLKLSCAASGFTFN |
| | | | KYAMNWVRQAPGKGLEWVARIRSKYNNYATYYADSVKDRFTISRDDS |
| | | | KNTAYLQMNNLKTEDTAVYYCVRHGNFGNSYISYWAYWGQGTLVTVS |
| | | | SGGGGSGGGGSGGGGSQTVVTQEPSLTVSPGGTVTLTCGSSTGAVTS |
| | | | GNYPNWVQQKPGQAPRGLIGGTKFLAPGTPARFSGSLLGGKAALTLS |
| | | | GVQPEDEAEYYCVLWYSNRWVFGGGTKLTVLGGGGDKTHTCPPCPAP |
| | | | ELLGGPSVFLFPPKPKDTLMISRTPEVTCVVVDVSHEDPEVKFNWYV |
| | | | DGVEVHNAKTKPCEEQYGSTYRCVSVLTVLHQDWLNGKEYKCKVSNK |
| | | | ALPAPIEKTISKAKGQPREPQVYTLPPSREEMTKNQVSLTCLVKGFY |
| | | | PSDIAVEWESNGQPENNYKTTPPVLDSDGSFFLYSKLTVDKSRWQQG |
| | | | NVFSCSVMHEALHNHYTQKSLSLSPGKGGGGSGGGGSGGGGSGGGGS |
| | | | GGGGSGGGGSDKTHTCPPCPAPELLGGPSVFLFPPKPKDTLMISRTP |
| | | | EVTCVVVDVSHEDPEVKFNWYVDGVEVHNAKTKPCEEQYGSTYRCVS |
| | | | VLTVLHQDWLNGKEYKCKVSNKALPAPIEKTISKAKGQPREPQVYTL |
| | | | PPSREEMTKNQVSLTCLVKGFYPSDIAVEWESNGQPENNYKTTPPVL |
| | | | DSDGSFFLYSKLTVDKSRWQQGNVFSCSVMHEALHNHYTQKSLSLSP |
| | | | GK |
| 1155. | CD70_36xCD | VH | QVQLVESGGGVVQPGRSLRLSCAASGFTFSTYGMHWVRQAPGKGLEW |
| | 3-scFc | | VAVIWYEGSNKYYGESVKGRFTISRDNSKNTLYLQMNSLRAEDTAVY |
| | | | YCARDNSHYYYGMDVWGQGTLVTVSS |
| 1156. | CD70_36xCD | VL | QSVLTQPPSVSGAPGQRVTISCTGSSSNIGAGYDVNWYQQLPGTAPK |
| | 3-scFc | | LLIYVNNNRPSGVPDRFSGSKSGTSASLAITGLQAEDEADYYCQSYE |
| | | | TSLSASVFGGGTRLTVL |
| 1157. | CD70_36xCD | scFv | QVQLVESGGGVVQPGRSLRLSCAASGFTFSTYGMHWVRQAPGKGLEW |
| | 3-scFc | | VAVIWYEGSNKYYGESVKGRFTISRDNSKNTLYLQMNSLRAEDTAVY |
| | | | YCARDNSHYYYGMDVWGQGTLVTVSSGGGGSGGGGSGGGGSQSVLTQ |
| | | | PPSVSGAPGQRVTISCTGSSSNIGAGYDVNWYQQLPGTAPKLLIYVN |
| | | | NNRPSGVPDRFSGSKSGTSASLAITGLQAEDEADYYCQSYETSLSAS |
| | | | VFGGGTRLTVL |
| 1158. | CD70_36xCD | bispecific | QVQLVESGGGVVQPGRSLRLSCAASGFTFSTYGMHWVRQAPGKGLEW |
| | 3-scFc | molecule | VAVIWYEGSNKYYGESVKGRFTISRDNSKNTLYLQMNSLRAEDTAVY |
| | | | YCARDNSHYYYGMDVWGQGTLVTVSSGGGGSGGGGSGGGGSQSVLTQ |
| | | | PPSVSGAPGQRVTISCTGSSSNIGAGYDVNWYQQLPGTAPKLLIYVN |
| | | | NNRPSGVPDRFSGSKSGTSASLAITGLQAEDEADYYCQSYETSLSAS |
| | | | VFGGGTRLTVLSGGGGSEVQLVESGGGLVQPGGSLKLSCAASGFTFN |
| | | | KYAMNWVRQAPGKGLEWVARIRSKYNNYATYYADSVKDRFTISRDDS |
| | | | KNTAYLQMNNLKTEDTAVYYCVRHGNFGNSYISYWAYWGQGTLVTVS |
| | | | SGGGGSGGGGSGGGGSQTVVTQEPSLTVSPGGTVTLTCGSSTGAVTS |
| | | | GNYPNWVQQKPGQAPRGLIGGTKFLAPGTPARFSGSLLGGKAALTLS |
| | | | GVQPEDEAEYYCVLWYSNRWVFGGGTKLTVL |
| 1159. | CD70_36xCD | bispecific | QVQVESGGGVVQPGRSLRLSCAASGFTFSTYGMHWVRQAPGKGLEW |
| | 3-scFc | HLE | VAVIWYEGSNKYYGESVKGRFTISRDNSKNTLYLQMNSLRAEDTAVY |
| | | molecule | YCARDNSHYYYGMDVWGQGTLVTVSSGGGGSGGGGSGGGGSQSVLTQ |
| | | | PPSVSGAPGQRVTISCTGSSSNIGAGYDVNWYQQLPGTAPKLLIYVN |
| | | | NNRPSGVPDRFSGSKSGTSASLAITGLQAEDEADYYCQSYETSLSAS |
| | | | VFGGGTRLTVLSGGGGSEVQLVESGGGLVQPGGSLKLSCAASGFTFN |
| | | | KYAMNWVRQAPGKGLEWVARIRSKYNNYATYYADSVKDRFTISRDDS |
| | | | KNTAYLQMNNLKTEDTAVYYCVRHGNFGNSYISYWAYWGQGTLVTVS |
| | | | SGGGGSGGGGSGGGGSQTVVTQEPSLTVSPGGTVTLTCGSSTGAVTS |
| | | | GNYPNWVQQKPGQAPRGLIGGTKFLAPGTPARFSGSLLGGKAALTLS |
| | | | GVQPEDEAEYYCVLWYSNRWVFGGGTKLTVLGGGGDKTHTCPPCPAP |
| | | | ELLGGPSVFLFPPKPKDTLMISRTPEVTCVVVDVSHEDPEVKFNWYV |
| | | | DGVEVHNAKTKPCEEQYGSTYRCVSVLTVLHQDWLNGKEYKCKVSNK |
| | | | ALPAPIEKTISKAKGQPREPQVYTLPPSREEMTKNQVSLTCLVKGFY |
| | | | PSDIAVEWESNGQPENNYKTTPPVLDSDGSFFLYSKLTVDKSRWQQG |
| | | | NVFSCSVMHEALHNHYTQKSLSLSPGKGGGGSGGGGSGGGGSGGGGS |
| | | | GGGGSGGGGSDKTHTCPPCPAPELLGGPSVFLFPPKPKDTLMISRTP |
| | | | EVTCVVVDVSHEDPEVKFNWYVDGVEVHNAKTKPCEEQYGSTYRCVS |
| | | | VLTVLHQDWLNGKEYKCKVSNKALPAPIEKTISKAKGQPREPQVYTL |
| | | | PPSREEMTKNQVSLTCLVKGFYPSDIAVEWESNGQPENNYKTTPPVL |
| | | | DSDGSFFLYSKLTVDKSRWQQGNVFSCSVMHEALHNHYTQKSLSLSP |
| | | | GK |
| 1160. | CD70_37_CC | VH CDR1 | SGVYYWS |
| | xCD3-scFc | | |
| 1161. | CD70_37_CC | VH CDR2 | YIYYSGSTSYNPSLKS |
| | xCD3-scFc | | |
| 1162. | CD70_37_CC | VH CDR3 | SGYSYALFDY |
| | xCD3-scFc | | |
| 1163. | CD70_37_CC | VL CDR1 | RASQSVDRYFN |
| | xCD3-scFc | | |
| 1164. | CD70_37_CC | VL CDR2 | AASSLQS |
| | xCD3-scFc | | |
| 1165. | CD70_37_CC | VL CDR3 | QQSYSTPWT |
| | xCD3-scFc | | |
| 1166. | CD70_37_CC | VH | QMQLQESGPGLVKPSETLSLTCTVSGGSIESGVYYWSWIRQPPGKCL |
| | xCD3-scFc | | EWIGYIYYSGSTSYNPSLKSRLTMSVDTSKNQFSLKLSSVTAADTAV |
| | | | YYCARSGYSYALFDYWGQGTLVTVSS |
| 1167. | CD70_37_CC | VL | DIQMTQSPSSLSASLGDRVTITCRASQSVDRYFNWYQQKPGKAPKVL |
| | xCD3-scFc | | IFAASSLQSGVPSRFSGSGSGTDFTLTISSLQPEDFATYYCQQSYST |
| | | | PWTFGCGTKVEVK |
| 1168. | CD70_37_CC | scFv | QMQLQESGPGLVKPSETLSLTCTVSGGSIESGVYYWSWIRQPPGKCL |
| | xCD3-scFc | | EWIGYIYYSGSTSYNPSLKSRLTMSVDTSKNQFSLKLSSVTAADTAV |
| | | | YYCARSGYSYALFDYWGQGTLVTVSSGGGGSGGGGSGGGGSDIQMTQ |
| | | | SPSSLSASLGDRVTITCRASQSVDRYFNWYQQKPGKAPKVLIFAASS |
| | | | LQSGVPSRFSGSGSGTDFTLTISSLQPEDFATYYCQQSYSTPWTFGC |
| | | | GTKVEVK |
| 1169. | CD70_37_CC | bispecific | QMQLQESGPGLVKPSETLSLTCTVSGGSIESGVYYWSWIRQPPGKCL |
| | xCD3-scFc | molecule | EWIGYIYYSGSTSYNPSLKSRLTMSVDTSKNQFSLKLSSVTAADTAV |
| | | | YYCARSGYSYALFDYWGQGTLVTVSSGGGGSGGGGSGGGGSDIQMTQ |
| | | | SPSSLSASLGDRVTITCRASQSVDRYFNWYQQKPGKAPKVLIFAASS |
| | | | LQSGVPSRFSGSGSGTDFTLTISSLQPEDFATYYCQQSYSTPWTFGC |
| | | | GTKVEVKSGGGGSEVQLVESGGGLVQPGGSLKLSCAASGFTFNKYAM |
| | | | NWVRQAPGKGLEWVARIRSKYNNYATYYADSVKDRFTISRDDSKNTA |
| | | | YLQMNNLKTEDTAVYYCVRHGNFGNSYISYWAYWGQGTLVTVSSGGG |
| | | | GSGGGGSGGGGSQTVVTQEPSLTVSPGGTVTLTCGSSTGAVTSGNYP |
| | | | NWVQQKPGQAPRGLIGGTKFLAPGTPARFSGSLLGGKAALTLSGVQP |
| | | | EDEAEYYCVLWYSNRWVFGGGTKLTVL |
| 1170. | CD70_37_CC | bispecific | QMQLQESGPGLVKPSETLSLTCTVSGGSIESGVYYWSWIRQPPGKCL |
| | xCD3-scFc | HLE | EWIGYIYYSGSTSYNPSLKSRLTMSVDTSKNQFSLKLSSVTAADTAV |
| | | molecule | YYCARSGYSYALFDYWGQGTLVTVSSGGGGSGGGGSGGGGSDIQMTQ |
| | | | SPSSLSASLGDRVTITCRASQSVDRYFNWYQQKPGKAPKVLIFAASS |
| | | | LQSGVPSRFSGSGSGTDFTLTISSLQPEDFATYYCQQSYSTPWTFGC |
| | | | GTKVEVKSGGGGSEVQLVESGGGLVQPGGSLKLSCAASGFTFNKYAM |
| | | | NWVRQAPGKGLEWVARIRSKYNNYATYYADSVKDRFTISRDDSKNTA |
| | | | YLQMNNLKTEDTAVYYCVRHGNFGNSYISYWAYWGQGTLVTVSSGGG |
| | | | GSGGGGSGGGGSQTVVTQEPSLTVSPGGTVTLTCGSSTGAVTSGNYP |
| | | | NWVQQKPGQAPRGLIGGTKFLAPGTPARFSGSLLGGKAALTLSGVQP |
| | | | EDEAEYYCVLWYSNRWVFGGGTKLTVLGGGGDKTHTCPPCPAPELLG |
| | | | GPSVFLFPPKPKDTLMISRTPEVTCVVVDVSHEDPEVKFNWYVDGVE |
| | | | VHNAKTKPCEEQYGSTYRCVSVLTVLHQDWLNGKEYKCKVSNKALPA |
| | | | PIEKTISKAKGQPREPQVYTLPPSREEMTKNQVSLTCLVKGFYPSDI |
| | | | AVEWESNGQPENNYKTTPPVLDSDGSFFLYSKLTVDKSRWQQGNVFS |
| | | | CSVMHEALHNHYTQKSLSLSPGKGGGGSGGGGSGGGGSGGGGSGGGG |
| | | | SGGGGSDKTHTCPPCPAPELLGGPSVFLFPPKPKDTLMISRTPEVTC |
| | | | VVVDVSHEDPEVKFNWYVDGVEVHNAKTKPCEEQYGSTYRCVSVLTV |
| | | | LHQDWLNGKEYKCKVSNKALPAPIEKTISKAKGQPREPQVYTLPPSR |
| | | | EEMTKNQVSLTCLVKGFYPSDIAVEWESNGQPENNYKTTPPVLDSDG |
| | | | SFFLYSKLTVDKSRWQQGNVFSCSVMHEALHNHYTQKSLSLSPGK |
| 1171. | CD70_37xCD | VH | QMQLQESGPGLVKPSETLSLTCTVSGGSIESGVYYWSWIRQPPGKGL |
| | 3-scFc | | EWIGYIYYSGSTSYNPSLKSRLTMSVDTSKNQFSLKLSSVTAADTAV |
| | | | YYCARSGYSYALFDYWGQGTLVTVSS |
| 1172. | CD70_37xCD | VL | DIQMTQSPSSLSASLGDRVTITCRASQSVDRYFNWYQQKPGKAPKVL |
| | 3-scFc | | IFAASSLQSGVPSRFSGSGSGTDFTLTISSLQPEDFATYYCQQSYST |
| | | | PWTFGQGTKVEVK |
| 1173. | CD70_37xCD | scFv | QMQLQESGPGLVKPSETLSLTCTVSGGSIESGVYYWSWIRQPPGKGL |
| | 3-scFc | | EWIGYIYYSGSTSYNPSLKSRLTMSVDTSKNQFSLKLSSVTAADTAV |
| | | | YYCARSGYSYALFDYWGQGTLVTVSSGGGGSGGGGSGGGGSDIQMTQ |
| | | | SPSSLSASLGDRVTITCRASQSVDRYFNWYQQKPGKAPKVLIFAASS |
| | | | LQSGVPSRFSGSGSGTDFTLTISSLQPEDFATYYCQQSYSTPWTFGQ |
| | | | GTKVEVK |
| 1174. | CD70_37xCD | bispecific | QMQLQESGPGLVKPSETLSLTCTVSGGSIESGVYYWSWIRQPPGKGL |
| | 3-scFc | molecule | EWIGYIYYSGSTSYNPSLKSRLTMSVDTSKNQFSLKLSSVTAADTAV |
| | | | YYCARSGYSYALFDYWGQGTLVTVSSGGGGSGGGGSGGGGSDIQMTQ |
| | | | SPSSLSASLGDRVTITCRASQSVDRYFNWYQQKPGKAPKVLIFAASS |
| | | | LQSGVPSRFSGSGSGTDFTLTISSLQPEDFATYYCQQSYSTPWTFGQ |
| | | | GTKVEVKSGGGGSEVQLVESGGGLVQPGGSLKLSCAASGFTFNKYAM |
| | | | NWVRQAPGKGLEWVARIRSKYNNYATYYADSVKDRFTISRDDSKNTA |
| | | | YLQMNNLKTEDTAVYYCVRHGNFGNSYISYWAYWGQGTLVTVSSGGG |
| | | | GSGGGGSGGGGSQTVVTQEPSLTVSPGGTVTLTCGSSTGAVTSGNYP |
| | | | NWVQQKPGQAPRGLIGGTKFLAPGTPARFSGSLLGGKAALTLSGVQP |
| | | | EDEAEYYCVLWYSNRWVFGGGTKLTVL |
| 1175. | CD70_37xCD | bispecific | QMQLQESGPGLVKPSETLSLTCTVSGGSIESGVYYWSWIRQPPGKGL |
| | 3-scFc | HLE | EWIGYIYYSGSTSYNPSLKSRLTMSVDTSKNQFSLKLSSVTAADTAV |
| | | molecule | YYCARSGYSYALFDYWGQGTLVTVSSGGGGSGGGGSGGGGSDIQMTQ |
| | | | SPSSLSASLGDRVTITCRASQSVDRYFNWYQQKPGKAPKVLIFAASS |
| | | | LQSGVPSRFSGSGSGTDFTLTISSLQPEDFATYYCQQSYSTPWTFGQ |
| | | | GTKVEVKSGGGGSEVQLVESGGGLVQPGGSLKLSCAASGFTFNKYAM |
| | | | NWVRQAPGKGLEWVARIRSKYNNYATYYADSVKDRFTISRDDSKNTA |
| | | | YLQMNNLKTEDTAVYYCVRHGNFGNSYISYWAYWGQGTLVTVSSGGG |
| | | | GSGGGGSGGGGSQTVVTQEPSLTVSPGGTVTLTCGSSTGAVTSGNYP |
| | | | NWVQQKPGQAPRGLIGGTKFLAPGTPARFSGSLLGGKAALTLSGVQP |
| | | | EDEAEYYCVLWYSNRWVFGGGTKLTVLGGGGDKTHTCPPCPAPELLG |
| | | | GPSVFLFPPKPKDTLMISRTPEVTCVVVDVSHEDPEVKFNWYVDGVE |
| | | | VHNAKTKPCEEQYGSTYRCVSVLTVLHQDWLNGKEYKCKVSNKALPA |
| | | | PIEKTISKAKGQPREPQVYTLPPSREEMTKNQVSLTCLVKGFYPSDI |
| | | | AVEWESNGQPENNYKTTPPVLDSDGSFFLYSKLTVDKSRWQQGNVFS |
| | | | CSVMHEALHNHYTQKSLSLSPGKGGGGSGGGGSGGGGSGGGGSGGGG |
| | | | SGGGGSDKTHTCPPCPAPELLGGPSVFLFPPKPKDTLMISRTPEVTC |
| | | | VVVDVSHEDPEVKFNWYVDGVEVHNAKTKPCEEQYGSTYRCVSVLTV |
| | | | LHQDWLNGKEYKCKVSNKALPAPIEKTISKAKGQPREPQVYTLPPSR |
| | | | EEMTKNQVSLTCLVKGFYPSDIAVEWESNGQPENNYKTTPPVLDSDG |
| | | | SFFLYSKLTVDKSRWQQGNVFSCSVMHEALHNHYTQKSLSLSPGK |
| 1176. | CD70_38_CC | VH CDR1 | SGGYYWS |
| | xCD3-scFc | | |
| 1177. | CD70_38_CC | VH CDR2 | YIFYSGSTDYNPSLKS |
| | xCD3-scFc | | |
| 1178. | CD70_38_CC | VH CDR3 | SGYSYALFDA |
| | xCD3-scFc | | |
| 1179. | CD70_38_CC | VL CDR1 | RASQFIGRYFN |
| | xCD3-scFc | | |
| 1180. | CD70_38_CC | VL CDR2 | AESSLQS |
| | xCD3-scFc | | |
| 1181. | CD70_38_CC | VL CDR3 | QQSYSTPWT |
| | xCD3-scFc | | |
| 1182. | CD70_38_CC | VH | QVQLQESGPGLVKPSQTLSLTCTVSGDSIISGGYYWSWIRQPPGKCL |
| | xCD3-scFc | | EWIGYIFYSGSTDYNPSLKSRVTISVDTSKNQFSLKLSSVTAADTAV |
| | | | YYCARSGYSYALFDAWGQGTLVTVSS |
| 1183. | CD70_38_CC | VL | DIQMTQSPSSLSASVGDRVTISCRASQFIGRYFNWYQQKPGKAPKVL |
| | xCD3-scFc | | IYAESSLQSGVPSRFSGSGSGTEFTLTISSLQPEDFATYYCQQSYST |
| | | | PWTFGCGTKVEIK |
| 1184. | CD70_38_CC | scFv | QVQLQESGPGLVKPSQTLSLTCTVSGDSIISGGYYWSWIRQPPGKCL |
| | xCD3-scFc | | EWIGYIFYSGSTDYNPSLKSRVTISVDTSKNQFSLKLSSVTAADTAV |
| | | | YYCARSGYSYALFDAWGQGTLVTVSSGGGGSGGGGSGGGGSDIQMTQ |
| | | | SPSSLSASVGDRVTISCRASQFIGRYFNWYQQKPGKAPKVLIYAESS |
| | | | LQSGVPSRFSGSGSGTEFTLTISSLQPEDFATYYCQQSYSTPWTFGC |
| | | | GTKVEIK |
| 1185. | CD70_38_CC | bispecific | QVQLQESGPGLVKPSQTLSLTCTVSGDSIISGGYYWSWIRQPPGKCL |
| | xCD3-scFc | molecule | EWIGYIFYSGSTDYNPSLKSRVTISVDTSKNQFSLKLSSVTAADTAV |
| | | | YYCARSGYSYALFDAWGQGTLVTVSSGGGGSGGGGSGGGGSDIQMTQ |
| | | | SPSSLSASVGDRVTISCRASQFIGRYFNWYQQKPGKAPKVLIYAESS |
| | | | LQSGVPSRFSGSGSGTEFTLTISSLQPEDFATYYCQQSYSTPWTFGC |
| | | | GTKVEIKSGGGGSEVQLVESGGGLVQPGGSLKLSCAASGFTFNKYAM |
| | | | NWVRQAPGKGLEWVARIRSKYNNYATYYADSVKDRFTISRDDSKNTA |
| | | | YLQMNNLKTEDTAVYYCVRHGNFGNSYISYWAYWGQGTLVTVSSGGG |
| | | | GSGGGGSGGGGSQTVVTQEPSLTVSPGGTVTLTCGSSTGAVTSGNYP |
| | | | NWVQQKPGQAPRGLIGGTKFLAPGTPARFSGSLLGGKAALTLSGVQP |
| | | | EDEAEYYCVLWYSNRWVFGGGTKLTVL |
| 1186. | CD70_38_CC | bispecific | QVQLQESGPGLVKPSQTLSLTCTVSGDSIISGGYYWSWIRQPPGKCL |
| | xCD3-scFc | HLE | EWIGYIFYSGSTDYNPSLKSRVTISVDTSKNQFSLKLSSVTAADTAV |
| | | molecule | YYCARSGYSYALFDAWGQGTLVTVSSGGGGSGGGGSGGGGSDIQMTQ |
| | | | SPSSLSASVGDRVTISCRASQFIGRYFNWYQQKPGKAPKVLIYAESS |
| | | | LQSGVPSRFSGSGSGTEFTLTISSLQPEDFATYYCQQSYSTPWTFGC |
| | | | GTKVEIKSGGGGSEVQLVESGGGLVQPGGSLKLSCAASGFTFNKYAM |
| | | | NWVRQAPGKGLEWVARIRSKYNNYATYYADSVKDRFTISRDDSKNTA |
| | | | YLQMNNLKTEDTAVYYCVRHGNFGNSYISYWAYWGQGTLVTVSSGGG |
| | | | GSGGGGSGGGGSQTVVTQEPSLTVSPGGTVTLTCGSSTGAVTSGNYP |
| | | | NWVQQKPGQAPRGLIGGTKFLAPGTPARFSGSLLGGKAALTLSGVQP |
| | | | EDEAEYYCVLWYSNRWVFGGGTKLTVLGGGGDKTHTCPPCPAPELLG |
| | | | GPSVFLFPPKPKDTLMISRTPEVTCVVVDVSHEDPEVKFNWYVDGVE |
| | | | VHNAKTKPCEEQYGSTYRCVSVLTVLHQDWLNGKEYKCKVSNKALPA |
| | | | PIEKTISKAKGQPREPQVYTLPPSREEMTKNQVSLTCLVKGFYPSDI |
| | | | AVEWESNGQPENNYKTTPPVLDSDGSFFLYSKLTVDKSRWQQGNVFS |
| | | | CSVMHEALHNHYTQKSLSLSPGKGGGGSGGGGSGGGGSGGGGSGGGG |
| | | | SGGGGSDKTHTCPPCPAPELLGGPSVFLFPPKPKDTLMISRTPEVTC |
| | | | VVVDVSHEDPEVKFNWYVDGVEVHNAKTKPCEEQYGSTYRCVSVLTV |
| | | | LHQDWLNGKEYKCKVSNKALPAPIEKTISKAKGQPREPQVYTLPPSR |
| | | | EEMTKNQVSLTCLVKGFYPSDIAVEWESNGQPENNYKTTPPVLDSDG |
| | | | SFFLYSKLTVDKSRWQQGNVFSCSVMHEALHNHYTQKSLSLSPGK |
| 1187. | CD70_38xCD | VH | QVQLQESGPGLVKPSQTLSLTCTVSGDSIISGGYYWSWIRQPPGKGL |
| | 3-scFc | | EWIGYIFYSGSTDYNPSLKSRVTISVDTSKNQFSLKLSSVTAADTAV |
| | | | YYCARSGYSYALFDAWGQGTLVTVSS |
| 1188. | CD7038xCD | VL | DIQMTQSPSSLSASVGDRVTISCRASQFIGRYFNWYQQKPGKAPKVL |
| | 3-scFc | | IYAESSLQSGVPSRFSGSGSGTEFTLTISSLQPEDFATYYCQQSYST |
| | | | PWTFGQGTKVEIK |
| 1189. | CD70_38xCD | scFv | QVQLQESGPGLVKPSQTLSLTCTVSGDSIISGGYYWSWIRQPPGKGL |
| | 3-scFc | | EWIGYIFYSGSTDYNPSLKSRVTISVDTSKNQFSLKLSSVTAADTAV |
| | | | YYCARSGYSYALFDAWGQGTLVTVSSGGGGSGGGGSGGGGSDIQMTQ |
| | | | SPSSLSASVGDRVTISCRASQFIGRYFNWYQQKPGKAPKVLIYAESS |
| | | | LQSGVPSRFSGSGSGTEFTLTISSLQPEDFATYYCQQSYSTPWTFGQ |
| | | | GTKVEIK |
| 1190. | CD70_38xCD | bispecific | QVQLQESGPGLVKPSQTLSLTCTVSGDSIISGGYYWSWIRQPPGKGL |
| | 3-scFc | molecule | EWIGYIFYSGSTDYNPSLKSRVTISVDTSKNQFSLKLSSVTAADTAV |
| | | | YYCARSGYSYALFDAWGQGTLVTVSSGGGGSGGGGSGGGGSDIQMTQ |
| | | | SPSSLSASVGDRVTISCRASQFIGRYFNWYQQKPGKAPKVLIYAESS |
| | | | LQSGVPSRFSGSGSGTEFTLTISSLQPEDFATYYCQQSYSTPWTFGQ |
| | | | GTKVEIKSGGGGSEVQLVESGGGLVQPGGSLKLSCAASGFTFNKYAM |
| | | | NWVRQAPGKGLEWVARIRSKYNNYATYYADSVKDRFTISRDDSKNTA |
| | | | YLQMNNLKTEDTAVYYCVRHGNFGNSYISYWAYWGQGTLVTVSSGGG |
| | | | GSGGGGSGGGGSQTVVTQEPSLTVSPGGTVTLTCGSSTGAVTSGNYP |
| | | | NWVQQKPGQAPRGLIGGTKFLAPGTPARFSGSLLGGKAALTLSGVQP |
| | | | EDEAEYYCVLWYSNRWVFGGGTKLTVL |
| 1191. | CD70_38xCD | bispecific | QVQLQESGPGLVKPSQTLSLTCTVSGDSIISGGYYWSWIRQPPGKGL |
| | 3-scFc | HLE | EWIGYIFYSGSTDYNPSLKSRVTISVDTSKNQFSLKLSSVTAADTAV |
| | | molecule | YYCARSGYSYALFDAWGQGTLVTVSSGGGGSGGGGSGGGGSDIQMTQ |
| | | | SPSSLSASVGDRVTISCRASQFIGRYFNWYQQKPGKAPKVLIYAESS |
| | | | LQSGVPSRFSGSGSGTEFTLTISSLQPEDFATYYCQQSYSTPWTFGQ |
| | | | GTKVEIKSGGGGSEVQLVESGGGLVQPGGSLKLSCAASGFTFNKYAM |
| | | | NWVRQAPGKGLEWVARIRSKYNNYATYYADSVKDRFTISRDDSKNTA |
| | | | YLQMNNLKTEDTAVYYCVRHGNFGNSYISYWAYWGQGTLVTVSSGGG |
| | | | GSGGGGSGGGGSQTVVTQEPSLTVSPGGTVTLTCGSSTGAVTSGNYP |
| | | | NWVQQKPGQAPRGLIGGTKFLAPGTPARFSGSLLGGKAALTLSGVQP |
| | | | EDEAEYYCVLWYSNRWVFGGGTKLTVLGGGGDKTHTCPPCPAPELLG |
| | | | GPSVFLFPPKPKDTLMISRTPEVTCVVVDVSHEDPEVKFNWYVDGVE |
| | | | VHNAKTKPCEEQYGSTYRCVSVLTVLHQDWLNGKEYKCKVSNKALPA |
| | | | PIEKTISKAKGQPREPQVYTLPPSREEMTKNQVSLTCLVKGFYPSDI |
| | | | AVEWESNGQPENNYKTTPPVLDSDGSFFLYSKLTVDKSRWQQGNVFS |
| | | | CSVMHEALHNHYTQKSLSLSPGKGGGGSGGGGSGGGGSGGGGSGGGG |
| | | | SGGGGSDKTHTCPPCPAPELLGGPSVFLFPPKPKDTLMISRTPEVTC |
| | | | VVVDVSHEDPEVKFNWYVDGVEVHNAKTKPCEEQYGSTYRCVSVLTV |
| | | | LHQDWLNGKEYKCKVSNKALPAPIEKTISKAKGQPREPQVYTLPPSR |
| | | | EEMTKNQVSLTCLVKGFYPSDIAVEWESNGQPENNYKTTPPVLDSDG |
| | | | SFFLYSKLTVDKSRWQQGNVFSCSVMHEALHNHYTQKSLSLSPGK |
| 1192. | CD70_1_CCx | bispecific | EVQLLESGGGLVQPGGSLRLSCAASGFTFSSYAMSWVRQAPGKCLEW |
| | CD3- | HLE | VSVISGSGGRPNYAESVKGRFTISRDNSKNTLYLQMNSLRDEDTAVY |
| | scFc_delGK | molecule | YCAKVDYSNYLFFDYWGQGTLVTVSSGGGGSGGGGSGGGGSEIVLTQ |
| | | | SPGTLSLSPGEGATLSCRAGQSVRSSYLGWYQQKPGQAPRLLIYGAS |
| | | | SRATGIPDRFSGSGSGTDFTLTISRLEPEDFAVYYCQQYGYSPPTFG |
| | | | CGTKLEIKSGGGGSEVQLVESGGGLVQPGGSLKLSCAASGFTFNKYA |
| | | | MNWVRQAPGKGLEWVARIRSKYNNYATYYADSVKDRFTISRDDSKNT |
| | | | AYLQMNNLKTEDTAVYYCVRHGNFGNSYISYWAYWGQGTLVTVSSGG |
| | | | GGSGGGGSGGGGSQTVVTQEPSLTVSPGGTVTLTCGSSTGAVTSGNY |
| | | | PNWVQQKPGQAPRGLIGGTKFLAPGTPARFSGSLLGGKAALTLSGVQ |
| | | | PEDEAEYYCVLWYSNRWVFGGGTKLTVLGGGGDKTHTCPPCPAPELL |
| | | | GGPSVFLFPPKPKDTLMISRTPEVTCVVVDVSHEDPEVKFNWYVDGV |
| | | | EVHNAKTKPCEEQYGSTYRCVSVLTVLHQDWLNGKEYKCKVSNKALP |
| | | | APIEKTISKAKGQPREPQVYTLPPSREEMTKNQVSLTCLVKGFYPSD |
| | | | IAVEWESNGQPENNYKTTPPVLDSDGSFFLYSKLTVDKSRWQQGNVF |
| | | | SCSVMHEALHNHYTQKSLSLSPGGGGSGGGGSGGGGSGGGGSGGGGS |
| | | | GGGGSDKTHTCPPCPAPELLGGPSVFLFPPKPKDTLMISRTPEVTCV |
| | | | VVDVSHEDPEVKFNWYVDGVEVHNAKTKPCEEQYGSTYRCVSVLTVL |
| | | | HQDWLNGKEYKCKVSNKALPAPIEKTISKAKGQPREPQVYTLPPSRE |
| | | | EMTKNQVSLTCLVKGFYPSDIAVEWESNGQPENNYKTTPPVLDSDGS |
| | | | FFLYSKLTVDKSRWQQGNVFSCSVMHEALHNHYTQKSLSLSPGK |
| 1193. | CD70_1xCD3 | bispecific | EVQLLESGGGLVQPGGSLRLSCAASGFTFSSYAMSWVRQAPGKGLEW |
| | -scFc_delGK | HLE | VSVISGSGGRPNYAESVKGRFTISRDNSKNTLYLQMNSLRDEDTAVY |
| | | molecule | YCAKVDYSNYLFFDYWGQGTLVTVSSGGGGSGGGGSGGGGSEIVLTQ |
| | | | SPGTLSLSPGEGATLSCRAGQSVRSSYLGWYQQKPGQAPRLLIYGAS |
| | | | SRATGIPDRFSGSGSGTDFTLTISRLEPEDFAVYYCQQYGYSPPTFG |
| | | | GGTKLEIKSGGGGSEVQLVESGGGLVQPGGSLKLSCAASGFTFNKYA |
| | | | MNWVRQAPGKGLEWVARIRSKYNNYATYYADSVKDRFTISRDDSKNT |
| | | | AYLQMNNLKTEDTAVYYCVRHGNFGNSYISYWAYWGQGTLVTVSSGG |
| | | | GGSGGGGSGGGGSQTVVTQEPSLTVSPGGTVTLTCGSSTGAVTSGNY |
| | | | PNWVQQKPGQAPRGLIGGTKFLAPGTPARFSGSLLGGKAALTLSGVQ |
| | | | PEDEAEYYCVLWYSNRWVFGGGTKLTVLGGGGDKTHTCPPCPAPELL |
| | | | GGPSVFLFPPKPKDTLMISRTPEVTCVVVDVSHEDPEVKFNWYVDGV |
| | | | EVHNAKTKPCEEQYGSTYRCVSVLTVLHQDWLNGKEYKCKVSNKALP |
| | | | APIEKTISKAKGQPREPQVYTLPPSREEMTKNQVSLTCLVKGFYPSD |
| | | | IAVEWESNGQPENNYKTTPPVLDSDGSFFLYSKLTVDKSRWQQGNVF |
| | | | SCSVMHEALHNHYTQKSLSLSPGGGGSGGGGSGGGGSGGGGSGGGGS |
| | | | GGGGSDKTHTCPPCPAPELLGGPSVFLFPPKPKDTLMISRTPEVTCV |
| | | | VVDVSHEDPEVKFNWYVDGVEVHNAKTKPCEEQYGSTYRCVSVLTVL |
| | | | HQDWLNGKEYKCKVSNKALPAPIEKTISKAKGQPREPQVYTLPPSRE |
| | | | EMTKNQVSLTCLVKGFYPSDIAVEWESNGQPENNYKTTPPVLDSDGS |
| | | | FFLYSKLTVDKSRWQQGNVFSCSVMHEALHNHYTQKSLSLSPGK |
| 1194. | CD70_2_CCx | bispecific | EVQLLESGGGLVQPGGSLKLSCAASGFTFSIYAMSWVRQAPGKCLEW |
| | CD3- | HLE | VSAISGSGGSTFYAESVKGRFTISRDNSKNTLYLQMNSLRAEDTAVY |
| | scFc_delGK | molecule | YCAKHDYSNYPYFDYWGQGTLVTVSSGGGGSGGGGSGGGGSEIVLTQ |
| | | | SPGTLSLSPGERATLSCRASQSVRSSYLAWYQQKPGQAPRLLIYGAS |
| | | | SRATGIPDRFSGSGSGTDFTLTISRLEPEDFAVYYCQQYGDLPFTFG |
| | | | CGTKLEIKSGGGGSEVQLVESGGGLVQPGGSLKLSCAASGFTFNKYA |
| | | | MNWVRQAPGKGLEWVARIRSKYNNYATYYADSVKDRFTISRDDSKNT |
| | | | AYLQMNNLKTEDTAVYYCVRHGNFGNSYISYWAYWGQGTLVTVSSGG |
| | | | GGSGGGGSGGGGSQTVVTQEPSLTVSPGGTVTLTCGSSTGAVTSGNY |
| | | | PNWVQQKPGQAPRGLIGGTKFLAPGTPARFSGSLLGGKAALTLSGVQ |
| | | | PEDEAEYYCVLWYSNRWVFGGGTKLTVLGGGGDKTHTCPPCPAPELL |
| | | | GGPSVFLFPPKPKDTLMISRTPEVTCVVVDVSHEDPEVKFNWYVDGV |
| | | | EVHNAKTKPCEEQYGSTYRCVSVLTVLHQDWLNGKEYKCKVSNKALP |
| | | | APIEKTISKAKGQPREPQVYTLPPSREEMTKNQVSLTCLVKGFYPSD |
| | | | IAVEWESNGQPENNYKTTPPVLDSDGSFFLYSKLTVDKSRWQQGNVF |
| | | | SCSVMHEALHNHYTQKSLSLSPGGGGSGGGGSGGGGSGGGGSGGGGS |
| | | | GGGGSDKTHTCPPCPAPELLGGPSVFLFPPKPKDTLMISRTPEVTCV |
| | | | VVDVSHEDPEVKFNWYVDGVEVHNAKTKPCEEQYGSTYRCVSVLTVL |
| | | | HQDWLNGKEYKCKVSNKALPAPIEKTISKAKGQPREPQVYTLPPSRE |
| | | | EMTKNQVSLTCLVKGFYPSDIAVEWESNGQPENNYKTTPPVLDSDGS |
| | | | FFLYSKLTVDKSRWQQGNVFSCSVMHEALHNHYTQKSLSLSPGK |
| 1195. | CD70_2xCD3- | bispecific | EVQLLESGGGLVQPGGSLKLSCAASGFTFSIYAMSWVRQAPGKGLEW |
| | scFc_delGK | HLE | VSAISGSGGSTFYAESVKGRFTISRDNSKNTLYLQMNSLRAEDTAVY |
| | | molecule | YCAKHDYSNYPYFDYWGQGTLVTVSSGGGGSGGGGSGGGGSEIVLTQ |
| | | | SPGTLSLSPGERATLSCRASQSVRSSYLAWYQQKPGQAPRLLIYGAS |
| | | | SRATGIPDRFSGSGSGTDFTLTISRLEPEDFAVYYCQQYGDLPFTFG |
| | | | PGTKLEIKSGGGGSEVQLVESGGGLVQPGGSLKLSCAASGFTFNKYA |
| | | | MNWVRQAPGKGLEWVARIRSKYNNYATYYADSVKDRFTISRDDSKNT |
| | | | AYLQMNNLKTEDTAVYYCVRHGNFGNSYISYWAYWGQGTLVTVSSGG |
| | | | GGSGGGGSGGGGSQTVVTQEPSLTVSPGGTVTLTCGSSTGAVTSGNY |
| | | | PNWVQQKPGQAPRGLIGGTKFLAPGTPARFSGSLLGGKAALTLSGVQ |
| | | | PEDEAEYYCVLWYSNRWVFGGGTKLTVLGGGGDKTHTCPPCPAPELL |
| | | | GGPSVFLFPPKPKDTLMISRTPEVTCVVVDVSHEDPEVKFNWYVDGV |
| | | | EVHNAKTKPCEEQYGSTYRCVSVLTVLHQDWLNGKEYKCKVSNKALP |
| | | | APIEKTISKAKGQPREPQVYTLPPSREEMTKNQVSLTCLVKGFYPSD |
| | | | IAVEWESNGQPENNYKTTPPVLDSDGSFFLYSKLTVDKSRWQQGNVF |
| | | | SCSVMHEALHNHYTQKSLSLSPGGGGSGGGGSGGGGSGGGGSGGGGS |
| | | | GGGGSDKTHTCPPCPAPELLGGPSVFLFPPKPKDTLMISRTPEVTCV |
| | | | VVDVSHEDPEVKFNWYVDGVEVHNAKTKPCEEQYGSTYRCVSVLTVL |
| | | | HQDWLNGKEYKCKVSNKALPAPIEKTISKAKGQPREPQVYTLPPSRE |
| | | | EMTKNQVSLTCLVKGFYPSDIAVEWESNGQPENNYKTTPPVLDSDGS |
| | | | FFLYSKLTVDKSRWQQGNVFSCSVMHEALHNHYTQKSLSLSPGK |
| 1196. | CD70_3_CCx | bispecific | EVQLLESGGGMVQPGGSLRLSCAASGFTFSSYAMSWVRQAPGKCLEW |
| | CD3- | HLE | VSAISGSGGRTFYAESVEGRFTISRDNSKNTLFLQMNSLRAEDTAVY |
| | scFc_delGK | molecule | YCAKHDYSNYPYFDYWGQGTLVTVSSGGGGSGGGGSGGGGSEIVLTQ |
| | | | SPGTLSLSPGERATLSCRASQSVRSSYLAWYQQKPGQAPRLLIYGAS |
| | | | SRATGIPDRFSGSGSGTDFTLTISRLEPEDFAVYYCQQYGSSPFTFG |
| | | | CGTKLEIKSGGGGSEVQLVESGGGLVQPGGSLKLSCAASGFTFNKYA |
| | | | MNWVRQAPGKGLEWVARIRSKYNNYATYYADSVKDRFTISRDDSKNT |
| | | | AYLQMNNLKTEDTAVYYCVRHGNFGNSYISYWAYWGQGTLVTVSSGG |
| | | | GGSGGGGSGGGGSQTVVTQEPSLTVSPGGTVTLTCGSSTGAVTSGNY |
| | | | PNWVQQKPGQAPRGLIGGTKFLAPGTPARFSGSLLGGKAALTLSGVQ |
| | | | PEDEAEYYCVLWYSNRWVFGGGTKLTVLGGGGDKTHTCPPCPAPELL |
| | | | GGPSVFLFPPKPKDTLMISRTPEVTCVVVDVSHEDPEVKFNWYVDGV |
| | | | EVHNAKTKPCEEQYGSTYRCVSVLTVLHQDWLNGKEYKCKVSNKALP |
| | | | APIEKTISKAKGQPREPQVYTLPPSREEMTKNQVSLTCLVKGFYPSD |
| | | | IAVEWESNGQPENNYKTTPPVLDSDGSFFLYSKLTVDKSRWQQGNVF |
| | | | SCSVMHEALHNHYTQKSLSLSPGGGGSGGGGSGGGGSGGGGSGGGGS |
| | | | GGGGSDKTHTCPPCPAPELLGGPSVFLFPPKPKDTLMISRTPEVTCV |
| | | | VVDVSHEDPEVKFNWYVDGVEVHNAKTKPCEEQYGSTYRCVSVLTVL |
| | | | HQDWLNGKEYKCKVSNKALPAPIEKTISKAKGQPREPQVYTLPPSRE |
| | | | EMTKNQVSLTCLVKGFYPSDIAVEWESNGQPENNYKTTPPVLDSDGS |
| | | | FFLYSKLTVDKSRWQQGNVFSCSVMHEALHNHYTQKSLSLSPGK |
| 1197. | CD70_3xCD3- | bispecific | EVQLLESGGGMVQPGGSLRLSCAASGFTFSSYAMSWVRQAPGKGLEW |
| | scFc_delGK | HLE | VSAISGSGGRTFYAESVEGRFTISRDNSKNTLFLQMNSLRAEDTAVY |
| | | molecule | YCAKHDYSNYPYFDYWGQGTLVTVSSGGGGSGGGGSGGGGSEIVLTQ |
| | | | SPGTLSLSPGERATLSCRASQSVRSSYLAWYQQKPGQAPRLLIYGAS |
| | | | SRATGIPDRFSGSGSGTDFTLTISRLEPEDFAVYYCQQYGSSPFTFG |
| | | | PGTKLEIKSGGGGSEVQLVESGGGLVQPGGSLKLSCAASGFTFNKYA |
| | | | MNWVRQAPGKGLEWVARIRSKYNNYATYYADSVKDRFTISRDDSKNT |
| | | | AYLQMNNLKTEDTAVYYCVRHGNFGNSYISYWAYWGQGTLVTVSSGG |
| | | | GGSGGGGSGGGGSQTVVTQEPSLTVSPGGTVTLTCGSSTGAVTSGNY |
| | | | PNWVQQKPGQAPRGLIGGTKFLAPGTPARFSGSLLGGKAALTLSGVQ |
| | | | PEDEAEYYCVLWYSNRWVFGGGTKLTVLGGGGDKTHTCPPCPAPELL |
| | | | GGPSVFLFPPKPKDTLMISRTPEVTCVVVDVSHEDPEVKFNWYVDGV |
| | | | EVHNAKTKPCEEQYGSTYRCVSVLTVLHQDWLNGKEYKCKVSNKALP |
| | | | APIEKTISKAKGQPREPQVYTLPPSREEMTKNQVSLTCLVKGFYPSD |
| | | | IAVEWESNGQPENNYKTTPPVLDSDGSFFLYSKLTVDKSRWQQGNVF |
| | | | SCSVMHEALHNHYTQKSLSLSPGGGGSGGGGSGGGGSGGGGSGGGGS |
| | | | GGGGSDKTHTCPPCPAPELLGGPSVFLFPPKPKDTLMISRTPEVTCV |
| | | | VVDVSHEDPEVKFNWYVDGVEVHNAKTKPCEEQYGSTYRCVSVLTVL |
| | | | HQDWLNGKEYKCKVSNKALPAPIEKTISKAKGQPREPQVYTLPPSRE |
| | | | EMTKNQVSLTCLVKGFYPSDIAVEWESNGQPENNYKTTPPVLDSDGS |
| | | | FFLYSKLTVDKSRWQQGNVFSCSVMHEALHNHYTQKSLSLSPGK |
| 1198. | CD70_4_CCx | bispecific | EVQLLESGGGMVQPGGSLRLSCAASGFTFSSYAMSWVRQAPGKCLEW |
| | CD3- | HLE | VSAISGSGGRTFYAESVEGRFTISRDNSKNTLYLQMNSLRAEDTAVY |
| | scFc_delGK | molecule | YCAKHDYSNYPYFDYWGQGTLVTVSSGGGGSGGGGSGGGGSEIVLTQ |
| | | | SPGTLSLSPGERATLSCRASQSIRSSYLAWYQQKPGQAPRLLIYGAS |
| | | | SRATGIPDRFSGSGSGTDFTLTISRLEPEDFAVYYCQQYGDLPFTFG |
| | | | CGTKLEIKSGGGGSEVQLVESGGGLVQPGGSLKLSCAASGFTFNKYA |
| | | | MNWVRQAPGKGLEWVARIRSKYNNYATYYADSVKDRFTISRDDSKNT |
| | | | AYLQMNNLKTEDTAVYYCVRHGNFGNSYISYWAYWGQGTLVTVSSGG |
| | | | GGSGGGGSGGGGSQTVVTQEPSLTVSPGGTVTLTCGSSTGAVTSGNY |
| | | | PNWVQQKPGQAPRGLIGGTKFLAPGTPARFSGSLLGGKAALTLSGVQ |
| | | | PEDEAEYYCVLWYSNRWVFGGGTKLTVLGGGGDKTHTCPPCPAPELL |
| | | | GGPSVFLFPPKPKDTLMISRTPEVTCVVVDVSHEDPEVKFNWYVDGV |
| | | | EVHNAKTKPCEEQYGSTYRCVSVLTVLHQDWLNGKEYKCKVSNKALP |
| | | | APIEKTISKAKGQPREPQVYTLPPSREEMTKNQVSLTCLVKGFYPSD |
| | | | IAVEWESNGQPENNYKTTPPVLDSDGSFFLYSKLTVDKSRWQQGNVF |
| | | | SCSVMHEALHNHYTQKSLSLSPGGGGSGGGGSGGGGSGGGGSGGGGS |
| | | | GGGGSDKTHTCPPCPAPELLGGPSVFLFPPKPKDTLMISRTPEVTCV |
| | | | VVDVSHEDPEVKFNWYVDGVEVHNAKTKPCEEQYGSTYRCVSVLTVL |
| | | | HQDWLNGKEYKCKVSNKALPAPIEKTISKAKGQPREPQVYTLPPSRE |
| | | | EMTKNQVSLTCLVKGFYPSDIAVEWESNGQPENNYKTTPPVLDSDGS |
| | | | FFLYSKLTVDKSRWQQGNVFSCSVMHEALHNHYTQKSLSLSPGK |
| 1199. | CD70_4xCD3- | bispecific | EVQLLESGGGMVQPGGSLRLSCAASGFTFSSYAMSWVRQAPGKGLEW |
| | scFc_delGK | HLE | VSAISGSGGRTFYAESVEGRFTISRDNSKNTLYLQMNSLRAEDTAVY |
| | | molecule | YCAKHDYSNYPYFDYWGQGTLVTVSSGGGGSGGGGSGGGGSEIVLTQ |
| | | | SPGTLSLSPGERATLSCRASQSIRSSYLAWYQQKPGQAPRLLIYGAS |
| | | | SRATGIPDRFSGSGSGTDFTLTISRLEPEDFAVYYCQQYGDLPFTFG |
| | | | PGTKLEIKSGGGGSEVQLVESGGGLVQPGGSLKLSCAASGFTFNKYA |
| | | | MNWVRQAPGKGLEWVARIRSKYNNYATYYADSVKDRFTISRDDSKNT |
| | | | AYLQMNNLKTEDTAVYYCVRHGNFGNSYISYWAYWGQGTLVTVSSGG |
| | | | GGSGGGGSGGGGSQTVVTQEPSLTVSPGGTVTLTCGSSTGAVTSGNY |
| | | | PNWVQQKPGQAPRGLIGGTKFLAPGTPARFSGSLLGGKAALTLSGVQ |
| | | | PEDEAEYYCVLWYSNRWVFGGGTKLTVLGGGGDKTHTCPPCPAPELL |
| | | | GGPSVFLFPPKPKDTLMISRTPEVTCVVVDVSHEDPEVKFNWYVDGV |
| | | | EVHNAKTKPCEEQYGSTYRCVSVLTVLHQDWLNGKEYKCKVSNKALP |
| | | | APIEKTISKAKGQPREPQVYTLPPSREEMTKNQVSLTCLVKGFYPSD |
| | | | IAVEWESNGQPENNYKTTPPVLDSDGSFFLYSKLTVDKSRWQQGNVF |
| | | | SCSVMHEALHNHYTQKSLSLSPGGGGSGGGGSGGGGSGGGGSGGGGS |
| | | | GGGGSDKTHTCPPCPAPELLGGPSVFLFPPKPKDTLMISRTPEVTCV |
| | | | VVDVSHEDPEVKFNWYVDGVEVHNAKTKPCEEQYGSTYRCVSVLTVL |
| | | | HQDWLNGKEYKCKVSNKALPAPIEKTISKAKGQPREPQVYTLPPSRE |
| | | | EMTKNQVSLTCLVKGFYPSDIAVEWESNGQPENNYKTTPPVLDSDGS |
| | | | FFLYSKLTVDKSRWQQGNVFSCSVMHEALHNHYTQKSLSLSPGK |
| 1200. | CD70_5_CCx | bispecific | EVQLLESGGGLVQSGGSLRLSCAASGFTFSSYAMSWVRQAPGKCLEW |
| | CD3- | HLE | VSAISGSGGRTHYAESVKGRFTISRDNSKNTLYLQMNSLRAEDTAVY |
| | scFc_delGK | molecule | YCAKHDYSNYPYFDYWGQGTLVTVSSGGGGSGGGGSGGGGSEIVLTQ |
| | | | SPGTLSLSPGERATLSCRASQSVRSSYLAWYQQKPGQAPRLLIYGAS |
| | | | SRATGIPDRFSGSGSGTDFTLTISRLEPEDFAVYYCQQYGSSPFTFG |
| | | | CGTKLEIKSGGGGSEVQLVESGGGLVQPGGSLKLSCAASGFTFNKYA |
| | | | MNWVRQAPGKGLEWVARIRSKYNNYATYYADSVKDRFTISRDDSKNT |
| | | | AYLQMNNLKTEDTAVYYCVRHGNFGNSYISYWAYWGQGTLVTVSSGG |
| | | | GGSGGGGSGGGGSQTVVTQEPSLTVSPGGTVTLTCGSSTGAVTSGNY |
| | | | PNWVQQKPGQAPRGLIGGTKFLAPGTPARFSGSLLGGKAALTLSGVQ |
| | | | PEDEAEYYCVLWYSNRWVFGGGTKLTVLGGGGDKTHTCPPCPAPELL |
| | | | GGPSVFLFPPKPKDTLMISRTPEVTCVVVDVSHEDPEVKFNWYVDGV |
| | | | EVHNAKTKPCEEQYGSTYRCVSVLTVLHQDWLNGKEYKCKVSNKALP |
| | | | APIEKTISKAKGQPREPQVYTLPPSREEMTKNQVSLTCLVKGFYPSD |
| | | | IAVEWESNGQPENNYKTTPPVLDSDGSFFLYSKLTVDKSRWQQGNVF |
| | | | SCSVMHEALHNHYTQKSLSLSPGGGGSGGGGSGGGGSGGGGSGGGGS |
| | | | GGGGSDKTHTCPPCPAPELLGGPSVFLFPPKPKDTLMISRTPEVTCV |
| | | | VVDVSHEDPEVKFNWYVDGVEVHNAKTKPCEEQYGSTYRCVSVLTVL |
| | | | HQDWLNGKEYKCKVSNKALPAPIEKTISKAKGQPREPQVYTLPPSRE |
| | | | EMTKNQVSLTCLVKGFYPSDIAVEWESNGQPENNYKTTPPVLDSDGS |
| | | | FFLYSKLTVDKSRWQQGNVFSCSVMHEALHNHYTQKSLSLSPGK |
| 1201. | CD70_5xCD3- | bispecific | EVQLLESGGGLVQSGGSLRLSCAASGFTFSSYAMSWVRQAPGKGLEW |
| | scFc_delGK | HLE | VSAISGSGGRTHYAESVKGRFTISRDNSKNTLYLQMNSLRAEDTAVY |
| | | molecule | YCAKHDYSNYPYFDYWGQGTLVTVSSGGGGSGGGGSGGGGSEIVLTQ |
| | | | SPGTLSLSPGERATLSCRASQSVRSSYLAWYQQKPGQAPRLLIYGAS |
| | | | SRATGIPDRFSGSGSGTDFTLTISRLEPEDFAVYYCQQYGSSPFTFG |
| | | | PGTKLEIKSGGGGSEVQLVESGGGLVQPGGSLKLSCAASGFTFNKYA |
| | | | MNWVRQAPGKGLEWVARIRSKYNNYATYYADSVKDRFTISRDDSKNT |
| | | | AYLQMNNLKTEDTAVYYCVRHGNFGNSYISYWAYWGQGTLVTVSSGG |
| | | | GGSGGGGSGGGGSQTVVTQEPSLTVSPGGTVTLTCGSSTGAVTSGNY |
| | | | PNWVQQKPGQAPRGLIGGTKFLAPGTPARFSGSLLGGKAALTLSGVQ |
| | | | PEDEAEYYCVLWYSNRWVFGGGTKLTVLGGGGDKTHTCPPCPAPELL |
| | | | GGPSVFLFPPKPKDTLMISRTPEVTCVVVDVSHEDPEVKFNWYVDGV |
| | | | EVHNAKTKPCEEQYGSTYRCVSVLTVLHQDWLNGKEYKCKVSNKALP |
| | | | APIEKTISKAKGQPREPQVYTLPPSREEMTKNQVSLTCLVKGFYPSD |
| | | | IAVEWESNGQPENNYKTTPPVLDSDGSFFLYSKLTVDKSRWQQGNVF |
| | | | SCSVMHEALHNHYTQKSLSLSPGGGGSGGGGSGGGGSGGGGSGGGGS |
| | | | GGGGSDKTHTCPPCPAPELLGGPSVFLFPPKPKDTLMISRTPEVTCV |
| | | | VVDVSHEDPEVKFNWYVDGVEVHNAKTKPCEEQYGSTYRCVSVLTVL |
| | | | HQDWLNGKEYKCKVSNKALPAPIEKTISKAKGQPREPQVYTLPPSRE |
| | | | EMTKNQVSLTCLVKGFYPSDIAVEWESNGQPENNYKTTPPVLDSDGS |
| | | | FFLYSKLTVDKSRWQQGNVFSCSVMHEALHNHYTQKSLSLSPGK |
| 1202. | CD70_6_CCx | bispecific | EVQLLESGGGLVQPGGSLRLSCAASGFTFSSYAMSWVRQAPGKCLEW |
| | CD3- | HLE | VSLISGSGGRTHYAESVKGRFTISRDNSKNTLYLQMNSLRAEDTAVY |
| | scFc_delGK | molecule | YCAKHDYSNYPYFDYWGQGTLVTVSSGGGGSGGGGSGGGGSEIVLTQ |
| | | | SPGTLSLSPGERATLSCRASQSVRSTYLAWYQQKPGQAPRLLIYDAS |
| | | | SRATGIPDRFSGSGSGTDFTLTISRLEPEDFAVYFCQQYGSSPPTFG |
| | | | CGTKLEIKSGGGGSEVQLVESGGGLVQPGGSLKLSCAASGFTFNKYA |
| | | | MNWVRQAPGKGLEWVARIRSKYNNYATYYADSVKDRFTISRDDSKNT |
| | | | AYLQMNNLKTEDTAVYYCVRHGNFGNSYISYWAYWGQGTLVTVSSGG |
| | | | GGSGGGGSGGGGSQTVVTQEPSLTVSPGGTVTLTCGSSTGAVTSGNY |
| | | | PNWVQQKPGQAPRGLIGGTKFLAPGTPARFSGSLLGGKAALTLSGVQ |
| | | | PEDEAEYYCVLWYSNRWVFGGGTKLTVLGGGGDKTHTCPPCPAPELL |
| | | | GGPSVFLFPPKPKDTLMISRTPEVTCVVVDVSHEDPEVKFNWYVDGV |
| | | | EVHNAKTKPCEEQYGSTYRCVSVLTVLHQDWLNGKEYKCKVSNKALP |
| | | | APIEKTISKAKGQPREPQVYTLPPSREEMTKNQVSLTCLVKGFYPSD |
| | | | IAVEWESNGQPENNYKTTPPVLDSDGSFFLYSKLTVDKSRWQQGNVF |
| | | | SCSVMHEALHNHYTQKSLSLSPGGGGSGGGGSGGGGSGGGGSGGGGS |
| | | | GGGGSDKTHTCPPCPAPELLGGPSVFLFPPKPKDTLMISRTPEVTCV |
| | | | VVDVSHEDPEVKFNWYVDGVEVHNAKTKPCEEQYGSTYRCVSVLTVL |
| | | | HQDWLNGKEYKCKVSNKALPAPIEKTISKAKGQPREPQVYTLPPSRE |
| | | | EMTKNQVSLTCLVKGFYPSDIAVEWESNGQPENNYKTTPPVLDSDGS |
| | | | FFLYSKLTVDKSRWQQGNVFSCSVMHEALHNHYTQKSLSLSPGK |
| 1203. | CD70_6xCD3- | bispecific | EVQLLESGGGLVQPGGSLRLSCAASGFTFSSYAMSWVRQAPGKGLEW |
| | scFc_delGK | HLE | VSLISGSGGRTHYAESVKGRFTISRDNSKNTLYLQMNSLRAEDTAVY |
| | | molecule | YCAKHDYSNYPYFDYWGQGTLVTVSSGGGGSGGGGSGGGGSEIVLTQ |
| | | | SPGTLSLSPGERATLSCRASQSVRSTYLAWYQQKPGQAPRLLIYDAS |
| | | | SRATGIPDRFSGSGSGTDFTLTISRLEPEDFAVYFCQQYGSSPPTFG |
| | | | GGTKLEIKSGGGGSEVQLVESGGGLVQPGGSLKLSCAASGFTFNKYA |
| | | | MNWVRQAPGKGLEWVARIRSKYNNYATYYADSVKDRFTISRDDSKNT |
| | | | AYLQMNNLKTEDTAVYYCVRHGNFGNSYISYWAYWGQGTLVTVSSGG |
| | | | GGSGGGGSGGGGSQTVVTQEPSLTVSPGGTVTLTCGSSTGAVTSGNY |
| | | | PNWVQQKPGQAPRGLIGGTKFLAPGTPARFSGSLLGGKAALTLSGVQ |
| | | | PEDEAEYYCVLWYSNRWVFGGGTKLTVLGGGGDKTHTCPPCPAPELL |
| | | | GGPSVFLFPPKPKDTLMISRTPEVTCVVVDVSHEDPEVKFNWYVDGV |
| | | | EVHNAKTKPCEEQYGSTYRCVSVLTVLHQDWLNGKEYKCKVSNKALP |
| | | | APIEKTISKAKGQPREPQVYTLPPSREEMTKNQVSLTCLVKGFYPSD |
| | | | IAVEWESNGQPENNYKTTPPVLDSDGSFFLYSKLTVDKSRWQQGNVF |
| | | | SCSVMHEALHNHYTQKSLSLSPGGGGSGGGGSGGGGSGGGGSGGGGS |
| | | | GGGGSDKTHTCPPCPAPELLGGPSVFLFPPKPKDTLMISRTPEVTCV |
| | | | VVDVSHEDPEVKFNWYVDGVEVHNAKTKPCEEQYGSTYRCVSVLTVL |
| | | | HQDWLNGKEYKCKVSNKALPAPIEKTISKAKGQPREPQVYTLPPSRE |
| | | | EMTKNQVSLTCLVKGFYPSDIAVEWESNGQPENNYKTTPPVLDSDGS |
| | | | FFLYSKLTVDKSRWQQGNVFSCSVMHEALHNHYTQKSLSLSPGK |
| 1204. | CD70_7_CCx | bispecific | EVQLLESGGGLVQPGGSLRLSCAASGFTFSTYAMSWVRQAPGKCLEW |
| | CD3- | HLE | VSAISGSGGSTFYAESVKGRFTISRDNSKNTLSLQMNSLRAEDTAVY |
| | scFc_delGK | molecule | YCAKHDYSNYPYFDYWGQGTLVTVSSGGGGSGGGGSGGGGSEIVLTQ |
| | | | SPGTLSLSPGERATLSCRASQSVRSSYLAWYQQKPGQAPRLLIYGAS |
| | | | SRATGIPDRFSGSGSGTDFTLTISRLEPEDFAVYYCQQYGDLPFTFG |
| | | | CGTKLEIKSGGGGSEVQLVESGGGLVQPGGSLKLSCAASGFTFNKYA |
| | | | MNWVRQAPGKGLEWVARIRSKYNNYATYYADSVKDRFTISRDDSKNT |
| | | | AYLQMNNLKTEDTAVYYCVRHGNFGNSYISYWAYWGQGTLVTVSSGG |
| | | | GGSGGGGSGGGGSQTVVTQEPSLTVSPGGTVTLTCGSSTGAVTSGNY |
| | | | PNWVQQKPGQAPRGLIGGTKFLAPGTPARFSGSLLGGKAALTLSGVQ |
| | | | PEDEAEYYCVLWYSNRWVFGGGTKLTVLGGGGDKTHTCPPCPAPELL |
| | | | GGPSVFLFPPKPKDTLMISRTPEVTCVVVDVSHEDPEVKFNWYVDGV |
| | | | EVHNAKTKPCEEQYGSTYRCVSVLTVLHQDWLNGKEYKCKVSNKALP |
| | | | APIEKTISKAKGQPREPQVYTLPPSREEMTKNQVSLTCLVKGFYPSD |
| | | | IAVEWESNGQPENNYKTTPPVLDSDGSFFLYSKLTVDKSRWQQGNVF |
| | | | SCSVMHEALHNHYTQKSLSLSPGGGGSGGGGSGGGGSGGGGSGGGGS |
| | | | GGGGSDKTHTCPPCPAPELLGGPSVFLFPPKPKDTLMISRTPEVTCV |
| | | | VVDVSHEDPEVKFNWYVDGVEVHNAKTKPCEEQYGSTYRCVSVLTVL |
| | | | HQDWLNGKEYKCKVSNKALPAPIEKTISKAKGQPREPQVYTLPPSRE |
| | | | EMTKNQVSLTCLVKGFYPSDIAVEWESNGQPENNYKTTPPVLDSDGS |
| | | | FFLYSKLTVDKSRWQQGNVFSCSVMHEALHNHYTQKSLSLSPGK |
| 1205. | CD70_7xCD3- | bispecific | EVQLLESGGGLVQPGGSLRLSCAASGFTFSTYAMSWVRQAPGKGLEW |
| | scFc_delGK | HLE | VSAISGSGGSTFYAESVKGRFTISRDNSKNTLSLQMNSLRAEDTAVY |
| | | molecule | YCAKHDYSNYPYFDYWGQGTLVTVSSGGGGSGGGGSGGGGSEIVLTQ |
| | | | SPGTLSLSPGERATLSCRASQSVRSSYLAWYQQKPGQAPRLLIYGAS |
| | | | SRATGIPDRFSGSGSGTDFTLTISRLEPEDFAVYYCQQYGDLPFTFG |
| | | | PGTKLEIKSGGGGSEVQLVESGGGLVQPGGSLKLSCAASGFTFNKYA |
| | | | MNWVRQAPGKGLEWVARIRSKYNNYATYYADSVKDRFTISRDDSKNT |
| | | | AYLQMNNLKTEDTAVYYCVRHGNFGNSYISYWAYWGQGTLVTVSSGG |
| | | | GGSGGGGSGGGGSQTVVTQEPSLTVSPGGTVTLTCGSSTGAVTSGNY |
| | | | PNWVQQKPGQAPRGLIGGTKFLAPGTPARFSGSLLGGKAALTLSGVQ |
| | | | PEDEAEYYCVLWYSNRWVFGGGTKLTVLGGGGDKTHTCPPCPAPELL |
| | | | GGPSVFLFPPKPKDTLMISRTPEVTCVVVDVSHEDPEVKFNWYVDGV |
| | | | EVHNAKTKPCEEQYGSTYRCVSVLTVLHQDWLNGKEYKCKVSNKALP |
| | | | APIEKTISKAKGQPREPQVYTLPPSREEMTKNQVSLTCLVKGFYPSD |
| | | | IAVEWESNGQPENNYKTTPPVLDSDGSFFLYSKLTVDKSRWQQGNVF |
| | | | SCSVMHEALHNHYTQKSLSLSPGGGGSGGGGSGGGGSGGGGSGGGGS |
| | | | GGGGSDKTHTCPPCPAPELLGGPSVFLFPPKPKDTLMISRTPEVTCV |
| | | | VVDVSHEDPEVKFNWYVDGVEVHNAKTKPCEEQYGSTYRCVSVLTVL |
| | | | HQDWLNGKEYKCKVSNKALPAPIEKTISKAKGQPREPQVYTLPPSRE |
| | | | EMTKNQVSLTCLVKGFYPSDIAVEWESNGQPENNYKTTPPVLDSDGS |
| | | | FFLYSKLTVDKSRWQQGNVFSCSVMHEALHNHYTQKSLSLSPGK |
| 1206. | CD70_8_CCx | bispecific | EVQLLESGGGMVQPGGSLRLSCAASGFTFSTYAMSWVRQAPGKCLEW |
| | CD3- | HLE | VSAISGSGGRTFYAESVEGRFTISRDNSKNTLYLQMNSLRAEDTAVY |
| | scFc_delGK | molecule | YCAKHDYSNYPYFDYWGQGTLVTVSSGGGGSGGGGSGGGGSEIVLTQ |
| | | | SPGTLSLSPGERATLSCRASQSVRSTYLAWYQQKPGQAPRLLIYGAS |
| | | | SRATGIPDRFSGSGSGTDFTLTISRLEPEDFAVYSCQQYGDLPFTFG |
| | | | CGTKLEIKSGGGGSEVQLVESGGGLVQPGGSLKLSCAASGFTFNKYA |
| | | | MNWVRQAPGKGLEWVARIRSKYNNYATYYADSVKDRFTISRDDSKNT |
| | | | AYLQMNNLKTEDTAVYYCVRHGNFGNSYISYWAYWGQGTLVTVSSGG |
| | | | GGSGGGGSGGGGSQTVVTQEPSLTVSPGGTVTLTCGSSTGAVTSGNY |
| | | | PNWVQQKPGQAPRGLIGGTKFLAPGTPARFSGSLLGGKAALTLSGVQ |
| | | | PEDEAEYYCVLWYSNRWVFGGGTKLTVLGGGGDKTHTCPPCPAPELL |
| | | | GGPSVFLFPPKPKDTLMISRTPEVTCVVVDVSHEDPEVKFNWYVDGV |
| | | | EVHNAKTKPCEEQYGSTYRCVSVLTVLHQDWLNGKEYKCKVSNKALP |
| | | | APIEKTISKAKGQPREPQVYTLPPSREEMTKNQVSLTCLVKGFYPSD |
| | | | IAVEWESNGQPENNYKTTPPVLDSDGSFFLYSKLTVDKSRWQQGNVF |
| | | | SCSVMHEALHNHYTQKSLSLSPGGGGSGGGGSGGGGSGGGGSGGGGS |
| | | | GGGGSDKTHTCPPCPAPELLGGPSVFLFPPKPKDTLMISRTPEVTCV |
| | | | VVDVSHEDPEVKFNWYVDGVEVHNAKTKPCEEQYGSTYRCVSVLTVL |
| | | | HQDWLNGKEYKCKVSNKALPAPIEKTISKAKGQPREPQVYTLPPSRE |
| | | | EMTKNQVSLTCLVKGFYPSDIAVEWESNGQPENNYKTTPPVLDSDGS |
| | | | FFLYSKLTVDKSRWQQGNVFSCSVMHEALHNHYTQKSLSLSPGK |
| 1207. | CD70_8xCD3- | bispecific | EVQLLESGGGMVQPGGSLRLSCAASGFTFSTYAMSWVRQAPGKGLEW |
| | scFc_delGK | HLE | VSAISGSGGRTFYAESVEGRFTISRDNSKNTLYLQMNSLRAEDTAVY |
| | | molecule | YCAKHDYSNYPYFDYWGQGTLVTVSSGGGGSGGGGSGGGGSEIVLTQ |
| | | | SPGTLSLSPGERATLSCRASQSVRSTYLAWYQQKPGQAPRLLIYGAS |
| | | | SRATGIPDRFSGSGSGTDFTLTISRLEPEDFAVYSCQQYGDLPFTFG |
| | | | PGTKLEIKSGGGGSEVQLVESGGGLVQPGGSLKLSCAASGFTFNKYA |
| | | | MNWVRQAPGKGLEWVARIRSKYNNYATYYADSVKDRFTISRDDSKNT |
| | | | AYLQMNNLKTEDTAVYYCVRHGNFGNSYISYWAYWGQGTLVTVSSGG |
| | | | GGSGGGGSGGGGSQTVVTQEPSLTVSPGGTVTLTCGSSTGAVTSGNY |
| | | | PNWVQQKPGQAPRGLIGGTKFLAPGTPARFSGSLLGGKAALTLSGVQ |
| | | | PEDEAEYYCVLWYSNRWVFGGGTKLTVLGGGGDKTHTCPPCPAPELL |
| | | | GGPSVFLFPPKPKDTLMISRTPEVTCVVVDVSHEDPEVKFNWYVDGV |
| | | | EVHNAKTKPCEEQYGSTYRCVSVLTVLHQDWLNGKEYKCKVSNKALP |
| | | | APIEKTISKAKGQPREPQVYTLPPSREEMTKNQVSLTCLVKGFYPSD |
| | | | IAVEWESNGQPENNYKTTPPVLDSDGSFFLYSKLTVDKSRWQQGNVF |
| | | | SCSVMHEALHNHYTQKSLSLSPGGGGSGGGGSGGGGSGGGGSGGGGS |
| | | | GGGGSDKTHTCPPCPAPELLGGPSVFLFPPKPKDTLMISRTPEVTCV |
| | | | VVDVSHEDPEVKFNWYVDGVEVHNAKTKPCEEQYGSTYRCVSVLTVL |
| | | | HQDWLNGKEYKCKVSNKALPAPIEKTISKAKGQPREPQVYTLPPSRE |
| | | | EMTKNQVSLTCLVKGFYPSDIAVEWESNGQPENNYKTTPPVLDSDGS |
| | | | FFLYSKLTVDKSRWQQGNVFSCSVMHEALHNHYTQKSLSLSPGK |
| 1208. | CD70_9_CCx | bispecific | EVQLLESGGGLVQPGGSLRLSCAASGFTFSSYAMSWVRQAPGKCLEW |
| | CD3- | HLE | VSAISGSGGYTYYAESVKGRFTISRDNSKNTLYLQMNSLRAEDTAVY |
| | scFc_delGK | molecule | YCAKHDYSNYPYFDYWGQGTLVTVSSGGGGSGGGGSGGGGSEIVLTQ |
| | | | SPGTLSLSPGERATLSCRASQSVRSNYLAWYQQKPGQAPRLLIYGAS |
| | | | SRATGIPDRFSGSGSGTDFTLTISRLEPEDFAVYYCQQYGDLPFTFG |
| | | | CGTKVEIKSGGGGSEVQLVESGGGLVQPGGSLKLSCAASGFTFNKYA |
| | | | MNWVRQAPGKGLEWVARIRSKYNNYATYYADSVKDRFTISRDDSKNT |
| | | | AYLQMNNLKTEDTAVYYCVRHGNFGNSYISYWAYWGQGTLVTVSSGG |
| | | | GGSGGGGSGGGGSQTVVTQEPSLTVSPGGTVTLTCGSSTGAVTSGNY |
| | | | PNWVQQKPGQAPRGLIGGTKFLAPGTPARFSGSLLGGKAALTLSGVQ |
| | | | PEDEAEYYCVLWYSNRWVFGGGTKLTVLGGGGDKTHTCPPCPAPELL |
| | | | GGPSVFLFPPKPKDTLMISRTPEVTCVVVDVSHEDPEVKFNWYVDGV |
| | | | EVHNAKTKPCEEQYGSTYRCVSVLTVLHQDWLNGKEYKCKVSNKALP |
| | | | APIEKTISKAKGQPREPQVYTLPPSREEMTKNQVSLTCLVKGFYPSD |
| | | | IAVEWESNGQPENNYKTTPPVLDSDGSFFLYSKLTVDKSRWQQGNVF |
| | | | SCSVMHEALHNHYTQKSLSLSPGGGGSGGGGSGGGGSGGGGSGGGGS |
| | | | GGGGSDKTHTCPPCPAPELLGGPSVFLFPPKPKDTLMISRTPEVTCV |
| | | | VVDVSHEDPEVKFNWYVDGVEVHNAKTKPCEEQYGSTYRCVSVLTVL |
| | | | HQDWLNGKEYKCKVSNKALPAPIEKTISKAKGQPREPQVYTLPPSRE |
| | | | EMTKNQVSLTCLVKGFYPSDIAVEWESNGQPENNYKTTPPVLDSDGS |
| | | | FFLYSKLTVDKSRWQQGNVFSCSVMHEALHNHYTQKSLSLSPGK |
| 1209. | CD70_9xCD3- | bispecific | EVQLLESGGGLVQPGGSLRLSCAASGFTFSSYAMSWVRQAPGKGLEW |
| | scFc_delGK | HLE | VSAISGSGGYTYYAESVKGRFTISRDNSKNTLYLQMNSLRAEDTAVY |
| | | molecule | YCAKHDYSNYPYFDYWGQGTLVTVSSGGGGSGGGGSGGGGSEIVLTQ |
| | | | SPGTLSLSPGERATLSCRASQSVRSNYLAWYQQKPGQAPRLLIYGAS |
| | | | SRATGIPDRFSGSGSGTDFTLTISRLEPEDFAVYYCQQYGDLPFTFG |
| | | | PGTKVEIKSGGGGSEVQLVESGGGLVQPGGSLKLSCAASGFTFNKYA |
| | | | MNWVRQAPGKGLEWVARIRSKYNNYATYYADSVKDRFTISRDDSKNT |
| | | | AYLQMNNLKTEDTAVYYCVRHGNFGNSYISYWAYWGQGTLVTVSSGG |
| | | | GGSGGGGSGGGGSQTVVTQEPSLTVSPGGTVTLTCGSSTGAVTSGNY |
| | | | PNWVQQKPGQAPRGLIGGTKFLAPGTPARFSGSLLGGKAALTLSGVQ |
| | | | PEDEAEYYCVLWYSNRWVFGGGTKLTVLGGGGDKTHTCPPCPAPELL |
| | | | GGPSVFLFPPKPKDTLMISRTPEVTCVVVDVSHEDPEVKFNWYVDGV |
| | | | EVHNAKTKPCEEQYGSTYRCVSVLTVLHQDWLNGKEYKCKVSNKALP |
| | | | APIEKTISKAKGQPREPQVYTLPPSREEMTKNQVSLTCLVKGFYPSD |
| | | | IAVEWESNGQPENNYKTTPPVLDSDGSFFLYSKLTVDKSRWQQGNVF |
| | | | SCSVMHEALHNHYTQKSLSLSPGGGGSGGGGSGGGGSGGGGSGGGGS |
| | | | GGGGSDKTHTCPPCPAPELLGGPSVFLFPPKPKDTLMISRTPEVTCV |
| | | | VVDVSHEDPEVKFNWYVDGVEVHNAKTKPCEEQYGSTYRCVSVLTVL |
| | | | HQDWLNGKEYKCKVSNKALPAPIEKTISKAKGQPREPQVYTLPPSRE |
| | | | EMTKNQVSLTCLVKGFYPSDIAVEWESNGQPENNYKTTPPVLDSDGS |
| | | | FFLYSKLTVDKSRWQQGNVFSCSVMHEALHNHYTQKSLSLSPGK |
| 1210. | CD70_10_CC | bispecific | EVQLLESGGGLAQPGGSLRLSCAASGFTFSSYAMSWVRQAPGKCLEW |
| | xCD3- | HLE | VSAISGSGGSTFYAESVKGRFTISRDNSKNTLYLQMNSLRAEDTAVY |
| | scFc_delGK | molecule | FCAKHDYSNYPYFDYWGQGTLVTVSSGGGGSGGGGSGGGGSEIVLTQ |
| | | | SPGTLSLSPGERATLSCRASQSVRSSYLAWYQQKPGQAPRLLIYGAS |
| | | | SRATGIPDRFSGSGSGTDFTLTISRLEPEDFAVYYCQQYGDLPFTFG |
| | | | CGTKVEIKSGGGGSEVQLVESGGGLVQPGGSLKLSCAASGFTFNKYA |
| | | | MNWVRQAPGKGLEWVARIRSKYNNYATYYADSVKDRFTISRDDSKNT |
| | | | AYLQMNNLKTEDTAVYYCVRHGNFGNSYISYWAYWGQGTLVTVSSGG |
| | | | GGSGGGGSGGGGSQTVVTQEPSLTVSPGGTVTLTCGSSTGAVTSGNY |
| | | | PNWVQQKPGQAPRGLIGGTKFLAPGTPARFSGSLLGGKAALTLSGVQ |
| | | | PEDEAEYYCVLWYSNRWVFGGGTKLTVLGGGGDKTHTCPPCPAPELL |
| | | | GGPSVFLFPPKPKDTLMISRTPEVTCVVVDVSHEDPEVKFNWYVDGV |
| | | | EVHNAKTKPCEEQYGSTYRCVSVLTVLHQDWLNGKEYKCKVSNKALP |
| | | | APIEKTISKAKGQPREPQVYTLPPSREEMTKNQVSLTCLVKGFYPSD |
| | | | IAVEWESNGQPENNYKTTPPVLDSDGSFFLYSKLTVDKSRWQQGNVF |
| | | | SCSVMHEALHNHYTQKSLSLSPGGGGSGGGGSGGGGSGGGGSGGGGS |
| | | | GGGGSDKTHTCPPCPAPELLGGPSVFLFPPKPKDTLMISRTPEVTCV |
| | | | VVDVSHEDPEVKFNWYVDGVEVHNAKTKPCEEQYGSTYRCVSVLTVL |
| | | | HQDWLNGKEYKCKVSNKALPAPIEKTISKAKGQPREPQVYTLPPSRE |
| | | | EMTKNQVSLTCLVKGFYPSDIAVEWESNGQPENNYKTTPPVLDSDGS |
| | | | FFLYSKLTVDKSRWQQGNVFSCSVMHEALHNHYTQKSLSLSPGK |
| 1211. | CD70_10xCD | bispecific | EVQLLESGGGLAQPGGSLRLSCAASGFTFSSYAMSWVRQAPGKGLEW |
| | 3-scFc_delGK | HLE | VSAISGSGGSTFYAESVKGRFTISRDNSKNTLYLQMNSLRAEDTAVY |
| | | molecule | FCAKHDYSNYPYFDYWGQGTLVTVSSGGGGSGGGGSGGGGSEIVLTQ |
| | | | SPGTLSLSPGERATLSCRASQSVRSSYLAWYQQKPGQAPRLLIYGAS |
| | | | SRATGIPDRFSGSGSGTDFTLTISRLEPEDFAVYYCQQYGDLPFTFG |
| | | | PGTKVEIKSGGGGSEVQLVESGGGLVQPGGSLKLSCAASGFTFNKYA |
| | | | MNWVRQAPGKGLEWVARIRSKYNNYATYYADSVKDRFTISRDDSKNT |
| | | | AYLQMNNLKTEDTAVYYCVRHGNFGNSYISYWAYWGQGTLVTVSSGG |
| | | | GGSGGGGSGGGGSQTVVTQEPSLTVSPGGTVTLTCGSSTGAVTSGNY |
| | | | PNWVQQKPGQAPRGLIGGTKFLAPGTPARFSGSLLGGKAALTLSGVQ |
| | | | PEDEAEYYCVLWYSNRWVFGGGTKLTVLGGGGDKTHTCPPCPAPELL |
| | | | GGPSVFLFPPKPKDTLMISRTPEVTCVVVDVSHEDPEVKFNWYVDGV |
| | | | EVHNAKTKPCEEQYGSTYRCVSVLTVLHQDWLNGKEYKCKVSNKALP |
| | | | APIEKTISKAKGQPREPQVYTLPPSREEMTKNQVSLTCLVKGFYPSD |
| | | | IAVEWESNGQPENNYKTTPPVLDSDGSFFLYSKLTVDKSRWQQGNVF |
| | | | SCSVMHEALHNHYTQKSLSLSPGGGGSGGGGSGGGGSGGGGSGGGGS |
| | | | GGGGSDKTHTCPPCPAPELLGGPSVFLFPPKPKDTLMISRTPEVTCV |
| | | | VVDVSHEDPEVKFNWYVDGVEVHNAKTKPCEEQYGSTYRCVSVLTVL |
| | | | HQDWLNGKEYKCKVSNKALPAPIEKTISKAKGQPREPQVYTLPPSRE |
| | | | EMTKNQVSLTCLVKGFYPSDIAVEWESNGQPENNYKTTPPVLDSDGS |
| | | | FFLYSKLTVDKSRWQQGNVFSCSVMHEALHNHYTQKSLSLSPGK |
| 1212. | CD70_11_CC | bispecific | EVQLLESGGGMVQPGGSLRLSCAASGFTFSSYAMSWVRQAPGKCLEW |
| | xCD3- | HLE | VSAISGSGGRTFYAESVEGRFTISRDNSKNTLYLQMNSLRAEDTAVY |
| | scFc_delGK | molecule | YCAKHDYSNYPYFDYWGQGTLVTVSSGGGGSGGGGSGGGGSEIVLTQ |
| | | | SPGTLSLSPGERATLSCRASQSVRSNYLAWYQQKPGQAPRLLIYGAS |
| | | | SRATGIPDRFSGSGSGTDFTLTISRLEPEDFAVYYCQQYGDLPFTFG |
| | | | CGTKVEIKSGGGGSEVQLVESGGGLVQPGGSLKLSCAASGFTFNKYA |
| | | | MNWVRQAPGKGLEWVARIRSKYNNYATYYADSVKDRFTISRDDSKNT |
| | | | AYLQMNNLKTEDTAVYYCVRHGNFGNSYISYWAYWGQGTLVTVSSGG |
| | | | GGSGGGGSGGGGSQTVVTQEPSLTVSPGGTVTLTCGSSTGAVTSGNY |
| | | | PNWVQQKPGQAPRGLIGGTKFLAPGTPARFSGSLLGGKAALTLSGVQ |
| | | | PEDEAEYYCVLWYSNRWVFGGGTKLTVLGGGGDKTHTCPPCPAPELL |
| | | | GGPSVFLFPPKPKDTLMISRTPEVTCVVVDVSHEDPEVKFNWYVDGV |
| | | | EVHNAKTKPCEEQYGSTYRCVSVLTVLHQDWLNGKEYKCKVSNKALP |
| | | | APIEKTISKAKGQPREPQVYTLPPSREEMTKNQVSLTCLVKGFYPSD |
| | | | IAVEWESNGQPENNYKTTPPVLDSDGSFFLYSKLTVDKSRWQQGNVF |
| | | | SCSVMHEALHNHYTQKSLSLSPGGGGSGGGGSGGGGSGGGGSGGGGS |
| | | | GGGGSDKTHTCPPCPAPELLGGPSVFLFPPKPKDTLMISRTPEVTCV |
| | | | VVDVSHEDPEVKFNWYVDGVEVHNAKTKPCEEQYGSTYRCVSVLTVL |
| | | | HQDWLNGKEYKCKVSNKALPAPIEKTISKAKGQPREPQVYTLPPSRE |
| | | | EMTKNQVSLTCLVKGFYPSDIAVEWESNGQPENNYKTTPPVLDSDGS |
| | | | FFLYSKLTVDKSRWQQGNVFSCSVMHEALHNHYTQKSLSLSPGK |
| 1213. | CD70_11xCD | bispecific | EVQLLESGGGMVQPGGSLRLSCAASGFTFSSYAMSWVRQAPGKGLEW |
| | 3-scFc_delGK | HLE | VSAISGSGGRTFYAESVEGRFTISRDNSKNTLYLQMNSLRAEDTAVY |
| | | molecule | YCAKHDYSNYPYFDYWGQGTLVTVSSGGGGSGGGGSGGGGSEIVLTQ |
| | | | SPGTLSLSPGERATLSCRASQSVRSNYLAWYQQKPGQAPRLLIYGAS |
| | | | SRATGIPDRFSGSGSGTDFTLTISRLEPEDFAVYYCQQYGDLPFTFG |
| | | | PGTKVEIKSGGGGSEVQLVESGGGLVQPGGSLKLSCAASGFTFNKYA |
| | | | MNWVRQAPGKGLEWVARIRSKYNNYATYYADSVKDRFTISRDDSKNT |
| | | | AYLQMNNLKTEDTAVYYCVRHGNFGNSYISYWAYWGQGTLVTVSSGG |
| | | | GGSGGGGSGGGGSQTVVTQEPSLTVSPGGTVTLTCGSSTGAVTSGNY |
| | | | PNWVQQKPGQAPRGLIGGTKFLAPGTPARFSGSLLGGKAALTLSGVQ |
| | | | PEDEAEYYCVLWYSNRWVFGGGTKLTVLGGGGDKTHTCPPCPAPELL |
| | | | GGPSVFLFPPKPKDTLMISRTPEVTCVVVDVSHEDPEVKFNWYVDGV |
| | | | EVHNAKTKPCEEQYGSTYRCVSVLTVLHQDWLNGKEYKCKVSNKALP |
| | | | APIEKTISKAKGQPREPQVYTLPPSREEMTKNQVSLTCLVKGFYPSD |
| | | | IAVEWESNGQPENNYKTTPPVLDSDGSFFLYSKLTVDKSRWQQGNVF |
| | | | SCSVMHEALHNHYTQKSLSLSPGGGGSGGGGSGGGGSGGGGSGGGGS |
| | | | GGGGSDKTHTCPPCPAPELLGGPSVFLFPPKPKDTLMISRTPEVTCV |
| | | | VVDVSHEDPEVKFNWYVDGVEVHNAKTKPCEEQYGSTYRCVSVLTVL |
| | | | HQDWLNGKEYKCKVSNKALPAPIEKTISKAKGQPREPQVYTLPPSRE |
| | | | EMTKNQVSLTCLVKGFYPSDIAVEWESNGQPENNYKTTPPVLDSDGS |
| | | | FFLYSKLTVDKSRWQQGNVFSCSVMHEALHNHYTQKSLSLSPGK |
| 1214. | CD70_12_CC | bispecific | EVQLLESGGGMVQPGGSLRLSCAASGFTFSSYAMSWVRQAPGKCLEW |
| | xCD3- | HLE | VSAISGSGGRTFYAESVEGRFTISRDNSKNTLYLQMNSLRAEDTAVY |
| | scFc_delGK | molecule | YCAKHDYSNYPYFDYWGQGTLVTVSSGGGGSGGGGSGGGGSEIVLTQ |
| | | | SPGTLSLSPGERATLSCRASQSVRSSYLAWYQQKPGQAPRLLIYGAS |
| | | | SRATGIPDRFSGSGSGTDFTLTISRLEPEDFAVYYCQQYGSSPFTFG |
| | | | CGTKVEIKSGGGGSEVQLVESGGGLVQPGGSLKLSCAASGFTFNKYA |
| | | | MNWVRQAPGKGLEWVARIRSKYNNYATYYADSVKDRFTISRDDSKNT |
| | | | AYLQMNNLKTEDTAVYYCVRHGNFGNSYISYWAYWGQGTLVTVSSGG |
| | | | GGSGGGGSGGGGSQTVVTQEPSLTVSPGGTVTLTCGSSTGAVTSGNY |
| | | | PNWVQQKPGQAPRGLIGGTKFLAPGTPARFSGSLLGGKAALTLSGVQ |
| | | | PEDEAEYYCVLWYSNRWVFGGGTKLTVLGGGGDKTHTCPPCPAPELL |
| | | | GGPSVFLFPPKPKDTLMISRTPEVTCVVVDVSHEDPEVKFNWYVDGV |
| | | | EVHNAKTKPCEEQYGSTYRCVSVLTVLHQDWLNGKEYKCKVSNKALP |
| | | | APIEKTISKAKGQPREPQVYTLPPSREEMTKNQVSLTCLVKGFYPSD |
| | | | IAVEWESNGQPENNYKTTPPVLDSDGSFFLYSKLTVDKSRWQQGNVF |
| | | | SCSVMHEALHNHYTQKSLSLSPGGGGSGGGGSGGGGSGGGGSGGGGS |
| | | | GGGGSDKTHTCPPCPAPELLGGPSVFLFPPKPKDTLMISRTPEVTCV |
| | | | VVDVSHEDPEVKFNWYVDGVEVHNAKTKPCEEQYGSTYRCVSVLTVL |
| | | | HQDWLNGKEYKCKVSNKALPAPIEKTISKAKGQPREPQVYTLPPSRE |
| | | | EMTKNQVSLTCLVKGFYPSDIAVEWESNGQPENNYKTTPPVLDSDGS |
| | | | FFLYSKLTVDKSRWQQGNVFSCSVMHEALHNHYTQKSLSLSPGK |
| 1215. | CD70_12xCD | bispecific | EVQLLESGGGMVQPGGSLRLSCAASGFTFSSYAMSWVRQAPGKGLEW |
| | 3-scFc_delGK | HLE | VSAISGSGGRTFYAESVEGRFTISRDNSKNTLYLQMNSLRAEDTAVY |
| | | molecule | YCAKHDYSNYPYFDYWGQGTLVTVSSGGGGSGGGGSGGGGSEIVLTQ |
| | | | SPGTLSLSPGERATLSCRASQSVRSSYLAWYQQKPGQAPRLLIYGAS |
| | | | SRATGIPDRFSGSGSGTDFTLTISRLEPEDFAVYYCQQYGSSPFTFG |
| | | | PGTKVEIKSGGGGSEVQLVESGGGLVQPGGSLKLSCAASGFTFNKYA |
| | | | MNWVRQAPGKGLEWVARIRSKYNNYATYYADSVKDRFTISRDDSKNT |
| | | | AYLQMNNLKTEDTAVYYCVRHGNFGNSYISYWAYWGQGTLVTVSSGG |
| | | | GGSGGGGSGGGGSQTVVTQEPSLTVSPGGTVTLTCGSSTGAVTSGNY |
| | | | PNWVQQKPGQAPRGLIGGTKFLAPGTPARFSGSLLGGKAALTLSGVQ |
| | | | PEDEAEYYCVLWYSNRWVFGGGTKLTVLGGGGDKTHTCPPCPAPELL |
| | | | GGPSVFLFPPKPKDTLMISRTPEVTCVVVDVSHEDPEVKFNWYVDGV |
| | | | EVHNAKTKPCEEQYGSTYRCVSVLTVLHQDWLNGKEYKCKVSNKALP |
| | | | APIEKTISKAKGQPREPQVYTLPPSREEMTKNQVSLTCLVKGFYPSD |
| | | | IAVEWESNGQPENNYKTTPPVLDSDGSFFLYSKLTVDKSRWQQGNVF |
| | | | SCSVMHEALHNHYTQKSLSLSPGGGGSGGGGSGGGGSGGGGSGGGGS |
| | | | GGGGSDKTHTCPPCPAPELLGGPSVFLFPPKPKDTLMISRTPEVTCV |
| | | | VVDVSHEDPEVKFNWYVDGVEVHNAKTKPCEEQYGSTYRCVSVLTVL |
| | | | HQDWLNGKEYKCKVSNKALPAPIEKTISKAKGQPREPQVYTLPPSRE |
| | | | EMTKNQVSLTCLVKGFYPSDIAVEWESNGQPENNYKTTPPVLDSDGS |
| | | | FFLYSKLTVDKSRWQQGNVFSCSVMHEALHNHYTQKSLSLSPGK |
| 1216. | CD70_13_CC | bispecific | EVQLLESGGGLVQPGGSLRLSCAASGFTFSSYAMSWVRQAPGKCLEW |
| | xCD3- | HLE | VSAISGSGGSTFYAESVQGRFTISRDNSKNTLYLQVNSLRAEDTAVY |
| | scFc_delGK | molecule | YCARHDYSNYPYFDYWGQGTLVTVSSGGGGSGGGGSGGGGSEIVLTQ |
| | | | SPGTLSLSPGERATLSCRASQSVRGNYLAWYQQKPGQAPRLLIYGAS |
| | | | SRATGIPDRFSGSGSGTDFTLTISRLEPEDFAVYYCQQYGYSPFTFG |
| | | | CGTKVEIKSGGGGSEVQLVESGGGLVQPGGSLKLSCAASGFTFNKYA |
| | | | MNWVRQAPGKGLEWVARIRSKYNNYATYYADSVKDRFTISRDDSKNT |
| | | | AYLQMNNLKTEDTAVYYCVRHGNFGNSYISYWAYWGQGTLVTVSSGG |
| | | | GGSGGGGSGGGGSQTVVTQEPSLTVSPGGTVTLTCGSSTGAVTSGNY |
| | | | PNWVQQKPGQAPRGLIGGTKFLAPGTPARFSGSLLGGKAALTLSGVQ |
| | | | PEDEAEYYCVLWYSNRWVFGGGTKLTVLGGGGDKTHTCPPCPAPELL |
| | | | GGPSVFLFPPKPKDTLMISRTPEVTCVVVDVSHEDPEVKFNWYVDGV |
| | | | EVHNAKTKPCEEQYGSTYRCVSVLTVLHQDWLNGKEYKCKVSNKALP |
| | | | APIEKTISKAKGQPREPQVYTLPPSREEMTKNQVSLTCLVKGFYPSD |
| | | | IAVEWESNGQPENNYKTTPPVLDSDGSFFLYSKLTVDKSRWQQGNVF |
| | | | SCSVMHEALHNHYTQKSLSLSPGGGGSGGGGSGGGGSGGGGSGGGGS |
| | | | GGGGSDKTHTCPPCPAPELLGGPSVFLFPPKPKDTLMISRTPEVTCV |
| | | | VVDVSHEDPEVKFNWYVDGVEVHNAKTKPCEEQYGSTYRCVSVLTVL |
| | | | HQDWLNGKEYKCKVSNKALPAPIEKTISKAKGQPREPQVYTLPPSRE |
| | | | EMTKNQVSLTCLVKGFYPSDIAVEWESNGQPENNYKTTPPVLDSDGS |
| | | | FFLYSKLTVDKSRWQQGNVFSCSVMHEALHNHYTQKSLSLSPGK |
| 1217. | CD70_13xCD | bispecific | EVQLLESGGGLVQPGGSLRLSCAASGFTFSSYAMSWVRQAPGKGLEW |
| | 3-scFc_delGK | HLE | VSAISGSGGSTFYAESVQGRFTISRDNSKNTLYLQVNSLRAEDTAVY |
| | | molecule | YCARHDYSNYPYFDYWGQGTLVTVSSGGGGSGGGGSGGGGSEIVLTQ |
| | | | SPGTLSLSPGERATLSCRASQSVRGNYLAWYQQKPGQAPRLLIYGAS |
| | | | SRATGIPDRFSGSGSGTDFTLTISRLEPEDFAVYYCQQYGYSPFTFG |
| | | | PGTKVEIKSGGGGSEVQLVESGGGLVQPGGSLKLSCAASGFTFNKYA |
| | | | MNWVRQAPGKGLEWVARIRSKYNNYATYYADSVKDRFTISRDDSKNT |
| | | | AYLQMNNLKTEDTAVYYCVRHGNFGNSYISYWAYWGQGTLVTVSSGG |
| | | | GGSGGGGSGGGGSQTVVTQEPSLTVSPGGTVTLTCGSSTGAVTSGNY |
| | | | PNWVQQKPGQAPRGLIGGTKFLAPGTPARFSGSLLGGKAALTLSGVQ |
| | | | PEDEAEYYCVLWYSNRWVFGGGTKLTVLGGGGDKTHTCPPCPAPELL |
| | | | GGPSVFLFPPKPKDTLMISRTPEVTCVVVDVSHEDPEVKFNWYVDGV |
| | | | EVHNAKTKPCEEQYGSTYRCVSVLTVLHQDWLNGKEYKCKVSNKALP |
| | | | APIEKTISKAKGQPREPQVYTLPPSREEMTKNQVSLTCLVKGFYPSD |
| | | | IAVEWESNGQPENNYKTTPPVLDSDGSFFLYSKLTVDKSRWQQGNVF |
| | | | SCSVMHEALHNHYTQKSLSLSPGGGGSGGGGSGGGGSGGGGSGGGGS |
| | | | GGGGSDKTHTCPPCPAPELLGGPSVFLFPPKPKDTLMISRTPEVTCV |
| | | | VVDVSHEDPEVKFNWYVDGVEVHNAKTKPCEEQYGSTYRCVSVLTVL |
| | | | HQDWLNGKEYKCKVSNKALPAPIEKTISKAKGQPREPQVYTLPPSRE |
| | | | EMTKNQVSLTCLVKGFYPSDIAVEWESNGQPENNYKTTPPVLDSDGS |
| | | | FFLYSKLTVDKSRWQQGNVFSCSVMHEALHNHYTQKSLSLSPGK |
| 1218. | CD70_14_CC | bispecific | EVQLLESGGGLVQPGGSLRLSCAASGFTFSTYAMSWVRQAPGKCLEW |
| | xCD3- | HLE | VSAISGSGGGTFYAESVKGRFTISRDNSKNTLYLQMNSLRAEDTAVY |
| | scFc_delGK | molecule | YCAKHDYSNYPYFDYWGQGTLVTVSSGGGGSGGGGSGGGGSEIVLTQ |
| | | | SPGTLSLSPGERATLSCRASQSIRSNYLAWYQQKPGQAPRLLIYGAS |
| | | | SRATGIPDRFSGSGSGTDFTLTISRLEPEDFAVYYCQQYGSSPFTFG |
| | | | CGTKVEIKSGGGGSEVQLVESGGGLVQPGGSLKLSCAASGFTFNKYA |
| | | | MNWVRQAPGKGLEWVARIRSKYNNYATYYADSVKDRFTISRDDSKNT |
| | | | AYLQMNNLKTEDTAVYYCVRHGNFGNSYISYWAYWGQGTLVTVSSGG |
| | | | GGSGGGGSGGGGSQTVVTQEPSLTVSPGGTVTLTCGSSTGAVTSGNY |
| | | | PNWVQQKPGQAPRGLIGGTKFLAPGTPARFSGSLLGGKAALTLSGVQ |
| | | | PEDEAEYYCVLWYSNRWVFGGGTKLTVLGGGGDKTHTCPPCPAPELL |
| | | | GGPSVFLFPPKPKDTLMISRTPEVTCVVVDVSHEDPEVKFNWYVDGV |
| | | | EVHNAKTKPCEEQYGSTYRCVSVLTVLHQDWLNGKEYKCKVSNKALP |
| | | | APIEKTISKAKGQPREPQVYTLPPSREEMTKNQVSLTCLVKGFYPSD |
| | | | IAVEWESNGQPENNYKTTPPVLDSDGSFFLYSKLTVDKSRWQQGNVF |
| | | | SCSVMHEALHNHYTQKSLSLSPGGGGSGGGGSGGGGSGGGGSGGGGS |
| | | | GGGGSDKTHTCPPCPAPELLGGPSVFLFPPKPKDTLMISRTPEVTCV |
| | | | VVDVSHEDPEVKFNWYVDGVEVHNAKTKPCEEQYGSTYRCVSVLTVL |
| | | | HQDWLNGKEYKCKVSNKALPAPIEKTISKAKGQPREPQVYTLPPSRE |
| | | | EMTKNQVSLTCLVKGFYPSDIAVEWESNGQPENNYKTTPPVLDSDGS |
| | | | FFLYSKLTVDKSRWQQGNVFSCSVMHEALHNHYTQKSLSLSPGK |
| 1219. | CD70_14xCD | bispecific | EVQLLESGGGLVQPGGSLRLSCAASGFTFSTYAMSWVRQAPGKGLEW |
| | 3-scFc_delGK | HLE | VSAISGSGGGTFYAESVKGRFTISRDNSKNTLYLQMNSLRAEDTAVY |
| | | molecule | YCAKHDYSNYPYFDYWGQGTLVTVSSGGGGSGGGGSGGGGSEIVLTQ |
| | | | SPGTLSLSPGERATLSCRASQSIRSNYLAWYQQKPGQAPRLLIYGAS |
| | | | SRATGIPDRFSGSGSGTDFTLTISRLEPEDFAVYYCQQYGSSPFTFG |
| | | | PGTKVEIKSGGGGSEVQLVESGGGLVQPGGSLKLSCAASGFTFNKYA |
| | | | MNWVRQAPGKGLEWVARIRSKYNNYATYYADSVKDRFTISRDDSKNT |
| | | | AYLQMNNLKTEDTAVYYCVRHGNFGNSYISYWAYWGQGTLVTVSSGG |
| | | | GGSGGGGSGGGGSQTVVTQEPSLTVSPGGTVTLTCGSSTGAVTSGNY |
| | | | PNWVQQKPGQAPRGLIGGTKFLAPGTPARFSGSLLGGKAALTLSGVQ |
| | | | PEDEAEYYCVLWYSNRWVFGGGTKLTVLGGGGDKTHTCPPCPAPELL |
| | | | GGPSVFLFPPKPKDTLMISRTPEVTCVVVDVSHEDPEVKFNWYVDGV |
| | | | EVHNAKTKPCEEQYGSTYRCVSVLTVLHQDWLNGKEYKCKVSNKALP |
| | | | APIEKTISKAKGQPREPQVYTLPPSREEMTKNQVSLTCLVKGFYPSD |
| | | | IAVEWESNGQPENNYKTTPPVLDSDGSFFLYSKLTVDKSRWQQGNVF |
| | | | SCSVMHEALHNHYTQKSLSLSPGGGGSGGGGSGGGGSGGGGSGGGGS |
| | | | GGGGSDKTHTCPPCPAPELLGGPSVFLFPPKPKDTLMISRTPEVTCV |
| | | | VVDVSHEDPEVKFNWYVDGVEVHNAKTKPCEEQYGSTYRCVSVLTVL |
| | | | HQDWLNGKEYKCKVSNKALPAPIEKTISKAKGQPREPQVYTLPPSRE |
| | | | EMTKNQVSLTCLVKGFYPSDIAVEWESNGQPENNYKTTPPVLDSDGS |
| | | | FFLYSKLTVDKSRWQQGNVFSCSVMHEALHNHYTQKSLSLSPGK |
| 1220. | CD70_15_CC | bispecific | EVQLLESGGGLVQPGGSLRLSCAASGFTFSTYAMSWVRQAPGKCLEW |
| | xCD3- | HLE | VSLISGSGGRTYYAESVKGRFTISRDNSKNTLYLQMNSLRAEDTAVY |
| | scFc_delGK | molecule | YCAKHDYSNYPYFDYWGQGTLVTVSSGGGGSGGGGSGGGGSEIVLTQ |
| | | | SPGTLSLSPGERATLSCRASQSVRSNYLAWYQQKPGQAPRLLIYGAS |
| | | | NRATGIPDRFSGSGSGTDFTLTISRLEPEDFAVYSCQQYGISPPTFG |
| | | | CGTKVEIKSGGGGSEVQLVESGGGLVQPGGSLKLSCAASGFTFNKYA |
| | | | MNWVRQAPGKGLEWVARIRSKYNNYATYYADSVKDRFTISRDDSKNT |
| | | | AYLQMNNLKTEDTAVYYCVRHGNFGNSYISYWAYWGQGTLVTVSSGG |
| | | | GGSGGGGSGGGGSQTVVTQEPSLTVSPGGTVTLTCGSSTGAVTSGNY |
| | | | PNWVQQKPGQAPRGLIGGTKFLAPGTPARFSGSLLGGKAALTLSGVQ |
| | | | PEDEAEYYCVLWYSNRWVFGGGTKLTVLGGGGDKTHTCPPCPAPELL |
| | | | GGPSVFLFPPKPKDTLMISRTPEVTCVVVDVSHEDPEVKFNWYVDGV |
| | | | EVHNAKTKPCEEQYGSTYRCVSVLTVLHQDWLNGKEYKCKVSNKALP |
| | | | APIEKTISKAKGQPREPQVYTLPPSREEMTKNQVSLTCLVKGFYPSD |
| | | | IAVEWESNGQPENNYKTTPPVLDSDGSFFLYSKLTVDKSRWQQGNVF |
| | | | SCSVMHEALHNHYTQKSLSLSPGGGGSGGGGSGGGGSGGGGSGGGGS |
| | | | GGGGSDKTHTCPPCPAPELLGGPSVFLFPPKPKDTLMISRTPEVTCV |
| | | | VVDVSHEDPEVKFNWYVDGVEVHNAKTKPCEEQYGSTYRCVSVLTVL |
| | | | HQDWLNGKEYKCKVSNKALPAPIEKTISKAKGQPREPQVYTLPPSRE |
| | | | EMTKNQVSLTCLVKGFYPSDIAVEWESNGQPENNYKTTPPVLDSDGS |
| | | | FFLYSKLTVDKSRWQQGNVFSCSVMHEALHNHYTQKSLSLSPGK |
| 1221. | CD70_15xCD | bispecific | EVQLLESGGGLVQPGGSLRLSCAASGFTFSTYAMSWVRQAPGKGLEW |
| | 3-scFc_delGK | HLE | VSLISGSGGRTYYAESVKGRFTISRDNSKNTLYLQMNSLRAEDTAVY |
| | | molecule | YCAKHDYSNYPYFDYWGQGTLVTVSSGGGGSGGGGSGGGGSEIVLTQ |
| | | | SPGTLSLSPGERATLSCRASQSVRSNYLAWYQQKPGQAPRLLIYGAS |
| | | | NRATGIPDRFSGSGSGTDFTLTISRLEPEDFAVYSCQQYGISPPTFG |
| | | | GGTKVEIKSGGGGSEVQLVESGGGLVQPGGSLKLSCAASGFTFNKYA |
| | | | MNWVRQAPGKGLEWVARIRSKYNNYATYYADSVKDRFTISRDDSKNT |
| | | | AYLQMNNLKTEDTAVYYCVRHGNFGNSYISYWAYWGQGTLVTVSSGG |
| | | | GGSGGGGSGGGGSQTVVTQEPSLTVSPGGTVTLTCGSSTGAVTSGNY |
| | | | PNWVQQKPGQAPRGLIGGTKFLAPGTPARFSGSLLGGKAALTLSGVQ |
| | | | PEDEAEYYCVLWYSNRWVFGGGTKLTVLGGGGDKTHTCPPCPAPELL |
| | | | GGPSVFLFPPKPKDTLMISRTPEVTCVVVDVSHEDPEVKFNWYVDGV |
| | | | EVHNAKTKPCEEQYGSTYRCVSVLTVLHQDWLNGKEYKCKVSNKALP |
| | | | APIEKTISKAKGQPREPQVYTLPPSREEMTKNQVSLTCLVKGFYPSD |
| | | | IAVEWESNGQPENNYKTTPPVLDSDGSFFLYSKLTVDKSRWQQGNVF |
| | | | SCSVMHEALHNHYTQKSLSLSPGGGGSGGGGSGGGGSGGGGSGGGGS |
| | | | GGGGSDKTHTCPPCPAPELLGGPSVFLFPPKPKDTLMISRTPEVTCV |
| | | | VVDVSHEDPEVKFNWYVDGVEVHNAKTKPCEEQYGSTYRCVSVLTVL |
| | | | HQDWLNGKEYKCKVSNKALPAPIEKTISKAKGQPREPQVYTLPPSRE |
| | | | EMTKNQVSLTCLVKGFYPSDIAVEWESNGQPENNYKTTPPVLDSDGS |
| | | | FFLYSKLTVDKSRWQQGNVFSCSVMHEALHNHYTQKSLSLSPGK |
| 1222. | CD70_16_CC | bispecific | EVQLLESGGGLVQPGGSLRLSCAASGFTFSSYAMSWVRQSPGKCLEW |
| | xCD3- | HLE | VSAISGSGGRAQYAESVQGRFTVSRDNSKNTLYLQMNSLRAEDTAVY |
| | scFc_delGK | molecule | YCAKHDYSNYPYFDYWGQGTLVTVSSGGGGSGGGGSGGGGSEIVLTQ |
| | | | SPATLSVSPGERATLSCRASQSVSSNLAWYQQKPGQAPRLLIYGSSS |
| | | | RATGIPDRFSGSGSGTDFTLTISRLEPEDFAVYYCQQYGSSPPPFGC |
| | | | GTKVEIKSGGGGSEVQLVESGGGLVQPGGSLKLSCAASGFTFNKYAM |
| | | | NWVRQAPGKGLEWVARIRSKYNNYATYYADSVKDRFTISRDDSKNTA |
| | | | YLQMNNLKTEDTAVYYCVRHGNFGNSYISYWAYWGQGTLVTVSSGGG |
| | | | GSGGGGSGGGGSQTVVTQEPSLTVSPGGTVTLTCGSSTGAVTSGNYP |
| | | | NWVQQKPGQAPRGLIGGTKFLAPGTPARFSGSLLGGKAALTLSGVQP |
| | | | EDEAEYYCVLWYSNRWVFGGGTKLTVLGGGGDKTHTCPPCPAPELLG |
| | | | GPSVFLFPPKPKDTLMISRTPEVTCVVVDVSHEDPEVKFNWYVDGVE |
| | | | VHNAKTKPCEEQYGSTYRCVSVLTVLHQDWLNGKEYKCKVSNKALPA |
| | | | PIEKTISKAKGQPREPQVYTLPPSREEMTKNQVSLTCLVKGFYPSDI |
| | | | AVEWESNGQPENNYKTTPPVLDSDGSFFLYSKLTVDKSRWQQGNVFS |
| | | | CSVMHEALHNHYTQKSLSLSPGGGGSGGGGSGGGGSGGGGSGGGGSG |
| | | | GGGSDKTHTCPPCPAPELLGGPSVFLFPPKPKDTLMISRTPEVTCVV |
| | | | VDVSHEDPEVKFNWYVDGVEVHNAKTKPCEEQYGSTYRCVSVLTVLH |
| | | | QDWLNGKEYKCKVSNKALPAPIEKTISKAKGQPREPQVYTLPPSREE |
| | | | MTKNQVSLTCLVKGFYPSDIAVEWESNGQPENNYKTTPPVLDSDGSF |
| | | | FLYSKLTVDKSRWQQGNVFSCSVMHEALHNHYTQKSLSLSPGK |
| 1223. | CD70_16xCD | bispecific | EVQLLESGGGLVQPGGSLRLSCAASGFTFSSYAMSWVRQSPGKGLEW |
| | 3-scFc_delGK | HLE | VSAISGSGGRAQYAESVQGRFTVSRDNSKNTLYLQMNSLRAEDTAVY |
| | | molecule | YCAKHDYSNYPYFDYWGQGTLVTVSSGGGGSGGGGSGGGGSEIVLTQ |
| | | | SPATLSVSPGERATLSCRASQSVSSNLAWYQQKPGQAPRLLIYGSSS |
| | | | RATGIPDRFSGSGSGTDFTLTISRLEPEDFAVYYCQQYGSSPPPFGG |
| | | | GTKVEIKSGGGGSEVQLVESGGGLVQPGGSLKLSCAASGFTFNKYAM |
| | | | NWVRQAPGKGLEWVARIRSKYNNYATYYADSVKDRFTISRDDSKNTA |
| | | | YLQMNNLKTEDTAVYYCVRHGNFGNSYISYWAYWGQGTLVTVSSGGG |
| | | | GSGGGGSGGGGSQTVVTQEPSLTVSPGGTVTLTCGSSTGAVTSGNYP |
| | | | NWVQQKPGQAPRGLIGGTKFLAPGTPARFSGSLLGGKAALTLSGVQP |
| | | | EDEAEYYCVLWYSNRWVFGGGTKLTVLGGGGDKTHTCPPCPAPELLG |
| | | | GPSVFLFPPKPKDTLMISRTPEVTCVVVDVSHEDPEVKFNWYVDGVE |
| | | | VHNAKTKPCEEQYGSTYRCVSVLTVLHQDWLNGKEYKCKVSNKALPA |
| | | | PIEKTISKAKGQPREPQVYTLPPSREEMTKNQVSLTCLVKGFYPSDI |
| | | | AVEWESNGQPENNYKTTPPVLDSDGSFFLYSKLTVDKSRWQQGNVFS |
| | | | CSVMHEALHNHYTQKSLSLSPGGGGSGGGGSGGGGSGGGGSGGGGSG |
| | | | GGGSDKTHTCPPCPAPELLGGPSVFLFPPKPKDTLMISRTPEVTCVV |
| | | | VDVSHEDPEVKFNWYVDGVEVHNAKTKPCEEQYGSTYRCVSVLTVLH |
| | | | QDWLNGKEYKCKVSNKALPAPIEKTISKAKGQPREPQVYTLPPSREE |
| | | | MTKNQVSLTCLVKGFYPSDIAVEWESNGQPENNYKTTPPVLDSDGSF |
| | | | FLYSKLTVDKSRWQQGNVFSCSVMHEALHNHYTQKSLSLSPGK |
| 1224. | CD70_17_CC | bispecific | EVQLLESGGGMVQPGGSLRLSCAASGFTFSSYAMSWVRQAPGKCLEW |
| | xCD3- | HLE | VSAISGSGGRTFYAESVEGRFTISRDNSKNTLYLQMNSLRAEDTAVY |
| | scFc_delGK | molecule | YCTKHDYSNYPYFDYWGQGTLVTVSSGGGGSGGGGSGGGGSEIVLTQ |
| | | | SPGTLSLSPGERATLSCRASQGVRSDYLAWYQQKPGQAPRLLIYGAS |
| | | | SRATGIPDRFSGSGSGTDFTLTISRLEPEDFAVYHCQQYGSTPPTFG |
| | | | CGTKVEIKSGGGGSEVQLVESGGGLVQPGGSLKLSCAASGFTFNKYA |
| | | | MNWVRQAPGKGLEWVARIRSKYNNYATYYADSVKDRFTISRDDSKNT |
| | | | AYLQMNNLKTEDTAVYYCVRHGNFGNSYISYWAYWGQGTLVTVSSGG |
| | | | GGSGGGGSGGGGSQTVVTQEPSLTVSPGGTVTLTCGSSTGAVTSGNY |
| | | | PNWVQQKPGQAPRGLIGGTKFLAPGTPARFSGSLLGGKAALTLSGVQ |
| | | | PEDEAEYYCVLWYSNRWVFGGGTKLTVLGGGGDKTHTCPPCPAPELL |
| | | | GGPSVFLFPPKPKDTLMISRTPEVTCVVVDVSHEDPEVKFNWYVDGV |
| | | | EVHNAKTKPCEEQYGSTYRCVSVLTVLHQDWLNGKEYKCKVSNKALP |
| | | | APIEKTISKAKGQPREPQVYTLPPSREEMTKNQVSLTCLVKGFYPSD |
| | | | IAVEWESNGQPENNYKTTPPVLDSDGSFFLYSKLTVDKSRWQQGNVF |
| | | | SCSVMHEALHNHYTQKSLSLSPGGGGSGGGGSGGGGSGGGGSGGGGS |
| | | | GGGGSDKTHTCPPCPAPELLGGPSVFLFPPKPKDTLMISRTPEVTCV |
| | | | VVDVSHEDPEVKFNWYVDGVEVHNAKTKPCEEQYGSTYRCVSVLTVL |
| | | | HQDWLNGKEYKCKVSNKALPAPIEKTISKAKGQPREPQVYTLPPSRE |
| | | | EMTKNQVSLTCLVKGFYPSDIAVEWESNGQPENNYKTTPPVLDSDGS |
| | | | FFLYSKLTVDKSRWQQGNVFSCSVMHEALHNHYTQKSLSLSPGK |
| 1225. | CD70_17xCD | bispecific | EVQLLESGGGMVQPGGSLRLSCAASGFTFSSYAMSWVRQAPGKGLEW |
| | 3-scFc_delGK | HLE | VSAISGSGGRTFYAESVEGRFTISRDNSKNTLYLQMNSLRAEDTAVY |
| | | molecule | YCTKHDYSNYPYFDYWGQGTLVTVSSGGGGSGGGGSGGGGSEIVLTQ |
| | | | SPGTLSLSPGERATLSCRASQGVRSDYLAWYQQKPGQAPRLLIYGAS |
| | | | SRATGIPDRFSGSGSGTDFTLTISRLEPEDFAVYHCQQYGSTPPTFG |
| | | | GGTKVEIKSGGGGSEVQLVESGGGLVQPGGSLKLSCAASGFTFNKYA |
| | | | MNWVRQAPGKGLEWVARIRSKYNNYATYYADSVKDRFTISRDDSKNT |
| | | | AYLQMNNLKTEDTAVYYCVRHGNFGNSYISYWAYWGQGTLVTVSSGG |
| | | | GGSGGGGSGGGGSQTVVTQEPSLTVSPGGTVTLTCGSSTGAVTSGNY |
| | | | PNWVQQKPGQAPRGLIGGTKFLAPGTPARFSGSLLGGKAALTLSGVQ |
| | | | PEDEAEYYCVLWYSNRWVFGGGTKLTVLGGGGDKTHTCPPCPAPELL |
| | | | GGPSVFLFPPKPKDTLMISRTPEVTCVVVDVSHEDPEVKFNWYVDGV |
| | | | EVHNAKTKPCEEQYGSTYRCVSVLTVLHQDWLNGKEYKCKVSNKALP |
| | | | APIEKTISKAKGQPREPQVYTLPPSREEMTKNQVSLTCLVKGFYPSD |
| | | | IAVEWESNGQPENNYKTTPPVLDSDGSFFLYSKLTVDKSRWQQGNVF |
| | | | SCSVMHEALHNHYTQKSLSLSPGGGGSGGGGSGGGGSGGGGSGGGGS |
| | | | GGGGSDKTHTCPPCPAPELLGGPSVFLFPPKPKDTLMISRTPEVTCV |
| | | | VVDVSHEDPEVKFNWYVDGVEVHNAKTKPCEEQYGSTYRCVSVLTVL |
| | | | HQDWLNGKEYKCKVSNKALPAPIEKTISKAKGQPREPQVYTLPPSRE |
| | | | EMTKNQVSLTCLVKGFYPSDIAVEWESNGQPENNYKTTPPVLDSDGS |
| | | | FFLYSKLTVDKSRWQQGNVFSCSVMHEALHNHYTQKSLSLSPGK |
| 1226. | CD70_18_CC | bispecific | EVQLLESGGGLVQPGGSLRLSCAASGFTFSSYAMSWVRQAPGKCLEW |
| | xCD3- | HLE | VSAIGEGGGYTYYAESVKGRFTISRDNSKNTLSLLMNSLRAEDTAVY |
| | scFc_delGK | molecule | YCARHDYSNYPYFDYWGQGTLVTVSSGGGGSGGGGSGGGGSEIVLTQ |
| | | | SPGTLSLSPGERATLSCRASQGVRSSYFAWYQQKPGQAPRLLIYGAS |
| | | | TRATGIPARFSGSGSGTDFTLTISRLEPEDFAVYYCQQYGSSPPTFG |
| | | | CGTKVEIKSGGGGSEVQLVESGGGLVQPGGSLKLSCAASGFTFNKYA |
| | | | MNWVRQAPGKGLEWVARIRSKYNNYATYYADSVKDRFTISRDDSKNT |
| | | | AYLQMNNLKTEDTAVYYCVRHGNFGNSYISYWAYWGQGTLVTVSSGG |
| | | | GGSGGGGSGGGGSQTVVTQEPSLTVSPGGTVTLTCGSSTGAVTSGNY |
| | | | PNWVQQKPGQAPRGLIGGTKFLAPGTPARFSGSLLGGKAALTLSGVQ |
| | | | PEDEAEYYCVLWYSNRWVFGGGTKLTVLGGGGDKTHTCPPCPAPELL |
| | | | GGPSVFLFPPKPKDTLMISRTPEVTCVVVDVSHEDPEVKFNWYVDGV |
| | | | EVHNAKTKPCEEQYGSTYRCVSVLTVLHQDWLNGKEYKCKVSNKALP |
| | | | APIEKTISKAKGQPREPQVYTLPPSREEMTKNQVSLTCLVKGFYPSD |
| | | | IAVEWESNGQPENNYKTTPPVLDSDGSFFLYSKLTVDKSRWQQGNVF |
| | | | SCSVMHEALHNHYTQKSLSLSPGGGGSGGGGSGGGGSGGGGSGGGGS |
| | | | GGGGSDKTHTCPPCPAPELLGGPSVFLFPPKPKDTLMISRTPEVTCV |
| | | | VVDVSHEDPEVKFNWYVDGVEVHNAKTKPCEEQYGSTYRCVSVLTVL |
| | | | HQDWLNGKEYKCKVSNKALPAPIEKTISKAKGQPREPQVYTLPPSRE |
| | | | EMTKNQVSLTCLVKGFYPSDIAVEWESNGQPENNYKTTPPVLDSDGS |
| | | | FFLYSKLTVDKSRWQQGNVFSCSVMHEALHNHYTQKSLSLSPGK |
| 1227. | CD70_18xCD | bispecific | EVQLLESGGGLVQPGGSLRLSCAASGFTFSSYAMSWVRQAPGKGLEW |
| | 3-scFc_delGK | HLE | VSAIGEGGGYTYYAESVKGRFTISRDNSKNTLSLLMNSLRAEDTAVY |
| | | molecule | YCARHDYSNYPYFDYWGQGTLVTVSSGGGGSGGGGSGGGGSEIVLTQ |
| | | | SPGTLSLSPGERATLSCRASQGVRSSYFAWYQQKPGQAPRLLIYGAS |
| | | | TRATGIPARFSGSGSGTDFTLTISRLEPEDFAVYYCQQYGSSPPTFG |
| | | | QGTKVEIKSGGGGSEVQLVESGGGLVQPGGSLKLSCAASGFTFNKYA |
| | | | MNWVRQAPGKGLEWVARIRSKYNNYATYYADSVKDRFTISRDDSKNT |
| | | | AYLQMNNLKTEDTAVYYCVRHGNFGNSYISYWAYWGQGTLVTVSSGG |
| | | | GGSGGGGSGGGGSQTVVTQEPSLTVSPGGTVTLTCGSSTGAVTSGNY |
| | | | PNWVQQKPGQAPRGLIGGTKFLAPGTPARFSGSLLGGKAALTLSGVQ |
| | | | PEDEAEYYCVLWYSNRWVFGGGTKLTVLGGGGDKTHTCPPCPAPELL |
| | | | GGPSVFLFPPKPKDTLMISRTPEVTCVVVDVSHEDPEVKFNWYVDGV |
| | | | EVHNAKTKPCEEQYGSTYRCVSVLTVLHQDWLNGKEYKCKVSNKALP |
| | | | APIEKTISKAKGQPREPQVYTLPPSREEMTKNQVSLTCLVKGFYPSD |
| | | | IAVEWESNGQPENNYKTTPPVLDSDGSFFLYSKLTVDKSRWQQGNVF |
| | | | SCSVMHEALHNHYTQKSLSLSPGGGGSGGGGSGGGGSGGGGSGGGGS |
| | | | GGGGSDKTHTCPPCPAPELLGGPSVFLFPPKPKDTLMISRTPEVTCV |
| | | | VVDVSHEDPEVKFNWYVDGVEVHNAKTKPCEEQYGSTYRCVSVLTVL |
| | | | HQDWLNGKEYKCKVSNKALPAPIEKTISKAKGQPREPQVYTLPPSRE |
| | | | EMTKNQVSLTCLVKGFYPSDIAVEWESNGQPENNYKTTPPVLDSDGS |
| | | | FFLYSKLTVDKSRWQQGNVFSCSVMHEALHNHYTQKSLSLSPGK |
| 1228. | CD70_19_CC | bispecific | EVQLLESGGGVVQPGRSLRLSCAASGFTFSSYAMSWVRQAPGKCLEW |
| | xCD3- | HLE | VSAISGSGGRTFYAESVEGRFTISRDNSKNTLYLQMNSLRAEDTAVY |
| | scFc_delGK | molecule | YCAKHDYSNYPYFDYWGQGTLVTVSSGGGGSGGGGSGGGGSEIVLTQ |
| | | | SPGTLSLSPGERATLSCRASQSIRSNYLAWYQQKPGQAPRLLIYGAS |
| | | | SRATGIPDRFSGSGSGTDFTLTISRLEPEDFAVYYCQQYGSSPPSFG |
| | | | CGTKVEIKSGGGGSEVQLVESGGGLVQPGGSLKLSCAASGFTFNKYA |
| | | | MNWVRQAPGKGLEWVARIRSKYNNYATYYADSVKDRFTISRDDSKNT |
| | | | AYLQMNNLKTEDTAVYYCVRHGNFGNSYISYWAYWGQGTLVTVSSGG |
| | | | GGSGGGGSGGGGSQTVVTQEPSLTVSPGGTVTLTCGSSTGAVTSGNY |
| | | | PNWVQQKPGQAPRGLIGGTKFLAPGTPARFSGSLLGGKAALTLSGVQ |
| | | | PEDEAEYYCVLWYSNRWVFGGGTKLTVLGGGGDKTHTCPPCPAPELL |
| | | | GGPSVFLFPPKPKDTLMISRTPEVTCVVVDVSHEDPEVKFNWYVDGV |
| | | | EVHNAKTKPCEEQYGSTYRCVSVLTVLHQDWLNGKEYKCKVSNKALP |
| | | | APIEKTISKAKGQPREPQVYTLPPSREEMTKNQVSLTCLVKGFYPSD |
| | | | IAVEWESNGQPENNYKTTPPVLDSDGSFFLYSKLTVDKSRWQQGNVF |
| | | | SCSVMHEALHNHYTQKSLSLSPGGGGSGGGGSGGGGSGGGGSGGGGS |
| | | | GGGGSDKTHTCPPCPAPELLGGPSVFLFPPKPKDTLMISRTPEVTCV |
| | | | VVDVSHEDPEVKFNWYVDGVEVHNAKTKPCEEQYGSTYRCVSVLTVL |
| | | | HQDWLNGKEYKCKVSNKALPAPIEKTISKAKGQPREPQVYTLPPSRE |
| | | | EMTKNQVSLTCLVKGFYPSDIAVEWESNGQPENNYKTTPPVLDSDGS |
| | | | FFLYSKLTVDKSRWQQGNVFSCSVMHEALHNHYTQKSLSLSPGK |
| 1229. | CD70_19xCD | bispecific | EVQLLESGGGVVQPGRSLRLSCAASGFTFSSYAMSWVRQAPGKGLEW |
| | 3-scFc_delGK | HLE | VSAISGSGGRTFYAESVEGRFTISRDNSKNTLYLQMNSLRAEDTAVY |
| | | molecule | YCAKHDYSNYPYFDYWGQGTLVTVSSGGGGSGGGGSGGGGSEIVLTQ |
| | | | SPGTLSLSPGERATLSCRASQSIRSNYLAWYQQKPGQAPRLLIYGAS |
| | | | SRATGIPDRFSGSGSGTDFTLTISRLEPEDFAVYYCQQYGSSPPSFG |
| | | | QGTKVEIKSGGGGSEVQLVESGGGLVQPGGSLKLSCAASGFTFNKYA |
| | | | MNWVRQAPGKGLEWVARIRSKYNNYATYYADSVKDRFTISRDDSKNT |
| | | | AYLQMNNLKTEDTAVYYCVRHGNFGNSYISYWAYWGQGTLVTVSSGG |
| | | | GGSGGGGSGGGGSQTVVTQEPSLTVSPGGTVTLTCGSSTGAVTSGNY |
| | | | PNWVQQKPGQAPRGLIGGTKFLAPGTPARFSGSLLGGKAALTLSGVQ |
| | | | PEDEAEYYCVLWYSNRWVFGGGTKLTVLGGGGDKTHTCPPCPAPELL |
| | | | GGPSVFLFPPKPKDTLMISRTPEVTCVVVDVSHEDPEVKFNWYVDGV |
| | | | EVHNAKTKPCEEQYGSTYRCVSVLTVLHQDWLNGKEYKCKVSNKALP |
| | | | APIEKTISKAKGQPREPQVYTLPPSREEMTKNQVSLTCLVKGFYPSD |
| | | | IAVEWESNGQPENNYKTTPPVLDSDGSFFLYSKLTVDKSRWQQGNVF |
| | | | SCSVMHEALHNHYTQKSLSLSPGGGGSGGGGSGGGGSGGGGSGGGGS |
| | | | GGGGSDKTHTCPPCPAPELLGGPSVFLFPPKPKDTLMISRTPEVTCV |
| | | | VVDVSHEDPEVKFNWYVDGVEVHNAKTKPCEEQYGSTYRCVSVLTVL |
| | | | HQDWLNGKEYKCKVSNKALPAPIEKTISKAKGQPREPQVYTLPPSRE |
| | | | EMTKNQVSLTCLVKGFYPSDIAVEWESNGQPENNYKTTPPVLDSDGS |
| | | | FFLYSKLTVDKSRWQQGNVFSCSVMHEALHNHYTQKSLSLSPGK |
| 1230. | CD70_20_CC | bispecific | EVQLLESGGGVVQPGRSLRLSCAASGFTFSSYAMSWVRQAPGKCLEW |
| | xCD3- | HLE | VSAISGSGGGTFYAESVEGRFTISRDNSKNTLYLQMNSLRAEDTAVY |
| | scFc_delGK | molecule | YCARHDYSNYPYFDYWGLGTLVTVSSGGGGSGGGGSGGGGSEIVLTQ |
| | | | SPGTLSLSPGERATLSCRASQSVRSSYLAWYQQKPGQAPRLLIYGAS |
| | | | SRATGIPDRFSGSGSGTDFTLTISRLEPEDFAVYSCQQYGDLPFTFG |
| | | | CGTKVEIKSGGGGSEVQLVESGGGLVQPGGSLKLSCAASGFTFNKYA |
| | | | MNWVRQAPGKGLEWVARIRSKYNNYATYYADSVKDRFTISRDDSKNT |
| | | | AYLQMNNLKTEDTAVYYCVRHGNFGNSYISYWAYWGQGTLVTVSSGG |
| | | | GGSGGGGSGGGGSQTVVTQEPSLTVSPGGTVTLTCGSSTGAVTSGNY |
| | | | PNWVQQKPGQAPRGLIGGTKFLAPGTPARFSGSLLGGKAALTLSGVQ |
| | | | PEDEAEYYCVLWYSNRWVFGGGTKLTVLGGGGDKTHTCPPCPAPELL |
| | | | GGPSVFLFPPKPKDTLMISRTPEVTCVVVDVSHEDPEVKFNWYVDGV |
| | | | EVHNAKTKPCEEQYGSTYRCVSVLTVLHQDWLNGKEYKCKVSNKALP |
| | | | APIEKTISKAKGQPREPQVYTLPPSREEMTKNQVSLTCLVKGFYPSD |
| | | | IAVEWESNGQPENNYKTTPPVLDSDGSFFLYSKLTVDKSRWQQGNVF |
| | | | SCSVMHEALHNHYTQKSLSLSPGGGGSGGGGSGGGGSGGGGSGGGGS |
| | | | GGGGSDKTHTCPPCPAPELLGGPSVFLFPPKPKDTLMISRTPEVTCV |
| | | | VVDVSHEDPEVKFNWYVDGVEVHNAKTKPCEEQYGSTYRCVSVLTVL |
| | | | HQDWLNGKEYKCKVSNKALPAPIEKTISKAKGQPREPQVYTLPPSRE |
| | | | EMTKNQVSLTCLVKGFYPSDIAVEWESNGQPENNYKTTPPVLDSDGS |
| | | | FFLYSKLTVDKSRWQQGNVFSCSVMHEALHNHYTQKSLSLSPGK |
| 1231. | CD70_20xCD | bispecific | EVQLLESGGGVVQPGRSLRLSCAASGFTFSSYAMSWVRQAPGKGLEW |
| | 3-scFc_delGK | HLE | VSAISGSGGGTFYAESVEGRFTISRDNSKNTLYLQMNSLRAEDTAVY |
| | | molecule | YCARHDYSNYPYFDYWGLGTLVTVSSGGGGSGGGGSGGGGSEIVLTQ |
| | | | SPGTLSLSPGERATLSCRASQSVRSSYLAWYQQKPGQAPRLLIYGAS |
| | | | SRATGIPDRFSGSGSGTDFTLTISRLEPEDFAVYSCQQYGDLPFTFG |
| | | | PGTKVEIKSGGGGSEVQLVESGGGLVQPGGSLKLSCAASGFTFNKYA |
| | | | MNWVRQAPGKGLEWVARIRSKYNNYATYYADSVKDRFTISRDDSKNT |
| | | | AYLQMNNLKTEDTAVYYCVRHGNFGNSYISYWAYWGQGTLVTVSSGG |
| | | | GGSGGGGSGGGGSQTVVTQEPSLTVSPGGTVTLTCGSSTGAVTSGNY |
| | | | PNWVQQKPGQAPRGLIGGTKFLAPGTPARFSGSLLGGKAALTLSGVQ |
| | | | PEDEAEYYCVLWYSNRWVFGGGTKLTVLGGGGDKTHTCPPCPAPELL |
| | | | GGPSVFLFPPKPKDTLMISRTPEVTCVVVDVSHEDPEVKFNWYVDGV |
| | | | EVHNAKTKPCEEQYGSTYRCVSVLTVLHQDWLNGKEYKCKVSNKALP |
| | | | APIEKTISKAKGQPREPQVYTLPPSREEMTKNQVSLTCLVKGFYPSD |
| | | | IAVEWESNGQPENNYKTTPPVLDSDGSFFLYSKLTVDKSRWQQGNVF |
| | | | SCSVMHEALHNHYTQKSLSLSPGGGGSGGGGSGGGGSGGGGSGGGGS |
| | | | GGGGSDKTHTCPPCPAPELLGGPSVFLFPPKPKDTLMISRTPEVTCV |
| | | | VVDVSHEDPEVKFNWYVDGVEVHNAKTKPCEEQYGSTYRCVSVLTVL |
| | | | HQDWLNGKEYKCKVSNKALPAPIEKTISKAKGQPREPQVYTLPPSRE |
| | | | EMTKNQVSLTCLVKGFYPSDIAVEWESNGQPENNYKTTPPVLDSDGS |
| | | | FFLYSKLTVDKSRWQQGNVFSCSVMHEALHNHYTQKSLSLSPGK |
| 1232. | CD70_21_CC | bispecific | EVQLLESGGGMVQPGGSLRLSCAASGFTFSSYAMSWVRQAPGKCLEW |
| | xCD3- | HLE | VSAISGSGGRTFYAESVEGRFTISRDNSKNTLYLQMNSLRAEDTAVY |
| | scFc_delGK | molecule | YCTKHDYSNYPYFDYWGQGTLVTVSSGGGGSGGGGSGGGGSEIVLTQ |
| | | | SPGTLSLSPGERATLSCRASQSVRSSYLAWYQQKPGQAPRLLIYGAS |
| | | | SRATGIPDRFSGSGSGTDFTLTISRLEPEDFAVYYCQQYGDLPFTFG |
| | | | CGTKVDIKSGGGGSEVQLVESGGGLVQPGGSLKLSCAASGFTFNKYA |
| | | | MNWVRQAPGKGLEWVARIRSKYNNYATYYADSVKDRFTISRDDSKNT |
| | | | AYLQMNNLKTEDTAVYYCVRHGNFGNSYISYWAYWGQGTLVTVSSGG |
| | | | GGSGGGGSGGGGSQTVVTQEPSLTVSPGGTVTLTCGSSTGAVTSGNY |
| | | | PNWVQQKPGQAPRGLIGGTKFLAPGTPARFSGSLLGGKAALTLSGVQ |
| | | | PEDEAEYYCVLWYSNRWVFGGGTKLTVLGGGGDKTHTCPPCPAPELL |
| | | | GGPSVFLFPPKPKDTLMISRTPEVTCVVVDVSHEDPEVKFNWYVDGV |
| | | | EVHNAKTKPCEEQYGSTYRCVSVLTVLHQDWLNGKEYKCKVSNKALP |
| | | | APIEKTISKAKGQPREPQVYTLPPSREEMTKNQVSLTCLVKGFYPSD |
| | | | IAVEWESNGQPENNYKTTPPVLDSDGSFFLYSKLTVDKSRWQQGNVF |
| | | | SCSVMHEALHNHYTQKSLSLSPGGGGSGGGGSGGGGSGGGGSGGGGS |
| | | | GGGGSDKTHTCPPCPAPELLGGPSVFLFPPKPKDTLMISRTPEVTCV |
| | | | VVDVSHEDPEVKFNWYVDGVEVHNAKTKPCEEQYGSTYRCVSVLTVL |
| | | | HQDWLNGKEYKCKVSNKALPAPIEKTISKAKGQPREPQVYTLPPSRE |
| | | | EMTKNQVSLTCLVKGFYPSDIAVEWESNGQPENNYKTTPPVLDSDGS |
| | | | FFLYSKLTVDKSRWQQGNVFSCSVMHEALHNHYTQKSLSLSPGK |
| 1233. | CD70_21xCD | bispecific | EVQLLESGGGMVQPGGSLRLSCAASGFTFSSYAMSWVRQAPGKGLEW |
| | 3-scFc_delGK | HLE | VSAISGSGGRTFYAESVEGRFTISRDNSKNTLYLQMNSLRAEDTAVY |
| | | molecule | YCTKHDYSNYPYFDYWGQGTLVTVSSGGGGSGGGGSGGGGSEIVLTQ |
| | | | SPGTLSLSPGERATLSCRASQSVRSSYLAWYQQKPGQAPRLLIYGAS |
| | | | SRATGIPDRFSGSGSGTDFTLTISRLEPEDFAVYYCQQYGDLPFTFG |
| | | | PGTKVDIKSGGGGSEVQLVESGGGLVQPGGSLKLSCAASGFTFNKYA |
| | | | MNWVRQAPGKGLEWVARIRSKYNNYATYYADSVKDRFTISRDDSKNT |
| | | | AYLQMNNLKTEDTAVYYCVRHGNFGNSYISYWAYWGQGTLVTVSSGG |
| | | | GGSGGGGSGGGGSQTVVTQEPSLTVSPGGTVTLTCGSSTGAVTSGNY |
| | | | PNWVQQKPGQAPRGLIGGTKFLAPGTPARFSGSLLGGKAALTLSGVQ |
| | | | PEDEAEYYCVLWYSNRWVFGGGTKLTVLGGGGDKTHTCPPCPAPELL |
| | | | GGPSVFLFPPKPKDTLMISRTPEVTCVVVDVSHEDPEVKFNWYVDGV |
| | | | EVHNAKTKPCEEQYGSTYRCVSVLTVLHQDWLNGKEYKCKVSNKALP |
| | | | APIEKTISKAKGQPREPQVYTLPPSREEMTKNQVSLTCLVKGFYPSD |
| | | | IAVEWESNGQPENNYKTTPPVLDSDGSFFLYSKLTVDKSRWQQGNVF |
| | | | SCSVMHEALHNHYTQKSLSLSPGGGGSGGGGSGGGGSGGGGSGGGGS |
| | | | GGGGSDKTHTCPPCPAPELLGGPSVFLFPPKPKDTLMISRTPEVTCV |
| | | | VVDVSHEDPEVKFNWYVDGVEVHNAKTKPCEEQYGSTYRCVSVLTVL |
| | | | HQDWLNGKEYKCKVSNKALPAPIEKTISKAKGQPREPQVYTLPPSRE |
| | | | EMTKNQVSLTCLVKGFYPSDIAVEWESNGQPENNYKTTPPVLDSDGS |
| | | | FFLYSKLTVDKSRWQQGNVFSCSVMHEALHNHYTQKSLSLSPGK |
| 1234. | CD70_22_CC | bispecific | EVQLLESGGGLVQPGGSLRLSCAASGFTFSTYAMSWVRQAPGKCLEW |
| | xCD3- | HLE | VSLISGSGGRTYYAESVKGRFTISRDNSKNTLYLQMNSLRAEDTAVY |
| | scFc_delGK | molecule | YCAKHDYSNYPYFDYWGQGTLVTVSSGGGGSGGGGSGGGGSEIVLTQ |
| | | | SPGTLSLSPGERATLSCRASQGVRSSYLAWYQQKPGQAPRLLIYGAS |
| | | | SRATGIPDRFSGSGSGTDFTLTINRLEPEDFAVYYCQQYGSSPPTFG |
| | | | CGTKVDIKSGGGGSEVQLVESGGGLVQPGGSLKLSCAASGFTFNKYA |
| | | | MNWVRQAPGKGLEWVARIRSKYNNYATYYADSVKDRFTISRDDSKNT |
| | | | AYLQMNNLKTEDTAVYYCVRHGNFGNSYISYWAYWGQGTLVTVSSGG |
| | | | GGSGGGGSGGGGSQTVVTQEPSLTVSPGGTVTLTCGSSTGAVTSGNY |
| | | | PNWVQQKPGQAPRGLIGGTKFLAPGTPARFSGSLLGGKAALTLSGVQ |
| | | | PEDEAEYYCVLWYSNRWVFGGGTKLTVLGGGGDKTHTCPPCPAPELL |
| | | | GGPSVFLFPPKPKDTLMISRTPEVTCVVVDVSHEDPEVKFNWYVDGV |
| | | | EVHNAKTKPCEEQYGSTYRCVSVLTVLHQDWLNGKEYKCKVSNKALP |
| | | | APIEKTISKAKGQPREPQVYTLPPSREEMTKNQVSLTCLVKGFYPSD |
| | | | IAVEWESNGQPENNYKTTPPVLDSDGSFFLYSKLTVDKSRWQQGNVF |
| | | | SCSVMHEALHNHYTQKSLSLSPGGGGSGGGGSGGGGSGGGGSGGGGS |
| | | | GGGGSDKTHTCPPCPAPELLGGPSVFLFPPKPKDTLMISRTPEVTCV |
| | | | VVDVSHEDPEVKFNWYVDGVEVHNAKTKPCEEQYGSTYRCVSVLTVL |
| | | | HQDWLNGKEYKCKVSNKALPAPIEKTISKAKGQPREPQVYTLPPSRE |
| | | | EMTKNQVSLTCLVKGFYPSDIAVEWESNGQPENNYKTTPPVLDSDGS |
| | | | FFLYSKLTVDKSRWQQGNVFSCSVMHEALHNHYTQKSLSLSPGK |
| 1235. | CD70_22xCD | bispecific | EVQLLESGGGLVQPGGSLRLSCAASGFTFSTYAMSWVRQAPGKGLEW |
| | 3-scFc_delGK | HLE | VSLISGSGGRTYYAESVKGRFTISRDNSKNTLYLQMNSLRAEDTAVY |
| | | molecule | YCAKHDYSNYPYFDYWGQGTLVTVSSGGGGSGGGGSGGGGSEIVLTQ |
| | | | SPGTLSLSPGERATLSCRASQGVRSSYLAWYQQKPGQAPRLLIYGAS |
| | | | SRATGIPDRFSGSGSGTDFTLTINRLEPEDFAVYYCQQYGSSPPTFG |
| | | | GGTKVDIKSGGGGSEVQLVESGGGLVQPGGSLKLSCAASGFTFNKYA |
| | | | MNWVRQAPGKGLEWVARIRSKYNNYATYYADSVKDRFTISRDDSKNT |
| | | | AYLQMNNLKTEDTAVYYCVRHGNFGNSYISYWAYWGQGTLVTVSSGG |
| | | | GGSGGGGSGGGGSQTVVTQEPSLTVSPGGTVTLTCGSSTGAVTSGNY |
| | | | PNWVQQKPGQAPRGLIGGTKFLAPGTPARFSGSLLGGKAALTLSGVQ |
| | | | PEDEAEYYCVLWYSNRWVFGGGTKLTVLGGGGDKTHTCPPCPAPELL |
| | | | GGPSVFLFPPKPKDTLMISRTPEVTCVVVDVSHEDPEVKFNWYVDGV |
| | | | EVHNAKTKPCEEQYGSTYRCVSVLTVLHQDWLNGKEYKCKVSNKALP |
| | | | APIEKTISKAKGQPREPQVYTLPPSREEMTKNQVSLTCLVKGFYPSD |
| | | | IAVEWESNGQPENNYKTTPPVLDSDGSFFLYSKLTVDKSRWQQGNVF |
| | | | SCSVMHEALHNHYTQKSLSLSPGGGGSGGGGSGGGGSGGGGSGGGGS |
| | | | GGGGSDKTHTCPPCPAPELLGGPSVFLFPPKPKDTLMISRTPEVTCV |
| | | | VVDVSHEDPEVKFNWYVDGVEVHNAKTKPCEEQYGSTYRCVSVLTVL |
| | | | HQDWLNGKEYKCKVSNKALPAPIEKTISKAKGQPREPQVYTLPPSRE |
| | | | EMTKNQVSLTCLVKGFYPSDIAVEWESNGQPENNYKTTPPVLDSDGS |
| | | | FFLYSKLTVDKSRWQQGNVFSCSVMHEALHNHYTQKSLSLSPGK |
| 1236. | CD70_23_CC | bispecific | EVQLLESGGGVVQPGRSLRLSCAASGFTFSSYAMSWVRQAPGKCLEW |
| | xCD3- | HLE | VSAISGSGGRTFYAESVEGRFTISRDNSKNTLYLQMNSLRAEDTAVY |
| | scFc_delGK | molecule | YCAKHDYSNYPYFDYWGQGTLVTVSSGGGGSGGGGSGGGGSEIVLTQ |
| | | | SPGTLSLSPGERATLSCRASQSVRSNYLAWYQQKPGQAPRLLIYGAS |
| | | | SRATGIPDRFSGSGSGTDFTLTINRLEPEDFAVYYCQQYGSSPPTFG |
| | | | CGTKVDIKSGGGGSEVQLVESGGGLVQPGGSLKLSCAASGFTFNKYA |
| | | | MNWVRQAPGKGLEWVARIRSKYNNYATYYADSVKDRFTISRDDSKNT |
| | | | AYLQMNNLKTEDTAVYYCVRHGNFGNSYISYWAYWGQGTLVTVSSGG |
| | | | GGSGGGGSGGGGSQTVVTQEPSLTVSPGGTVTLTCGSSTGAVTSGNY |
| | | | PNWVQQKPGQAPRGLIGGTKFLAPGTPARFSGSLLGGKAALTLSGVQ |
| | | | PEDEAEYYCVLWYSNRWVFGGGTKLTVLGGGGDKTHTCPPCPAPELL |
| | | | GGPSVFLFPPKPKDTLMISRTPEVTCVVVDVSHEDPEVKFNWYVDGV |
| | | | EVHNAKTKPCEEQYGSTYRCVSVLTVLHQDWLNGKEYKCKVSNKALP |
| | | | APIEKTISKAKGQPREPQVYTLPPSREEMTKNQVSLTCLVKGFYPSD |
| | | | IAVEWESNGQPENNYKTTPPVLDSDGSFFLYSKLTVDKSRWQQGNVF |
| | | | SCSVMHEALHNHYTQKSLSLSPGGGGSGGGGSGGGGSGGGGSGGGGS |
| | | | GGGGSDKTHTCPPCPAPELLGGPSVFLFPPKPKDTLMISRTPEVTCV |
| | | | VVDVSHEDPEVKFNWYVDGVEVHNAKTKPCEEQYGSTYRCVSVLTVL |
| | | | HQDWLNGKEYKCKVSNKALPAPIEKTISKAKGQPREPQVYTLPPSRE |
| | | | EMTKNQVSLTCLVKGFYPSDIAVEWESNGQPENNYKTTPPVLDSDGS |
| | | | FFLYSKLTVDKSRWQQGNVFSCSVMHEALHNHYTQKSLSLSPGK |
| 1237. | CD70_23xCD | bispecific | EVQLLESGGGVVQPGRSLRLSCAASGFTFSSYAMSWVRQAPGKGLEW |
| | 3-scFc_delGK | HLE | VSAISGSGGRTFYAESVEGRFTISRDNSKNTLYLQMNSLRAEDTAVY |
| | | molecule | YCAKHDYSNYPYFDYWGQGTLVTVSSGGGGSGGGGSGGGGSEIVLTQ |
| | | | SPGTLSLSPGERATLSCRASQSVRSNYLAWYQQKPGQAPRLLIYGAS |
| | | | SRATGIPDRFSGSGSGTDFTLTINRLEPEDFAVYYCQQYGSSPPTFG |
| | | | GGTKVDIKSGGGGSEVQLVESGGGLVQPGGSLKLSCAASGFTFNKYA |
| | | | MNWVRQAPGKGLEWVARIRSKYNNYATYYADSVKDRFTISRDDSKNT |
| | | | AYLQMNNLKTEDTAVYYCVRHGNFGNSYISYWAYWGQGTLVTVSSGG |
| | | | GGSGGGGSGGGGSQTVVTQEPSLTVSPGGTVTLTCGSSTGAVTSGNY |
| | | | PNWVQQKPGQAPRGLIGGTKFLAPGTPARFSGSLLGGKAALTLSGVQ |
| | | | PEDEAEYYCVLWYSNRWVFGGGTKLTVLGGGGDKTHTCPPCPAPELL |
| | | | GGPSVFLFPPKPKDTLMISRTPEVTCVVVDVSHEDPEVKFNWYVDGV |
| | | | EVHNAKTKPCEEQYGSTYRCVSVLTVLHQDWLNGKEYKCKVSNKALP |
| | | | APIEKTISKAKGQPREPQVYTLPPSREEMTKNQVSLTCLVKGFYPSD |
| | | | IAVEWESNGQPENNYKTTPPVLDSDGSFFLYSKLTVDKSRWQQGNVF |
| | | | SCSVMHEALHNHYTQKSLSLSPGGGGSGGGGSGGGGSGGGGSGGGGS |
| | | | GGGGSDKTHTCPPCPAPELLGGPSVFLFPPKPKDTLMISRTPEVTCV |
| | | | VVDVSHEDPEVKFNWYVDGVEVHNAKTKPCEEQYGSTYRCVSVLTVL |
| | | | HQDWLNGKEYKCKVSNKALPAPIEKTISKAKGQPREPQVYTLPPSRE |
| | | | EMTKNQVSLTCLVKGFYPSDIAVEWESNGQPENNYKTTPPVLDSDGS |
| | | | FFLYSKLTVDKSRWQQGNVFSCSVMHEALHNHYTQKSLSLSPGK |
| 1238. | CD70_24_CC | bispecific | EVQLLESGGGLVQPGGSLRLSCAASGFTFSSYAMSWVRQAPGKCLEW |
| | xCD3- | HLE | VSVISGSGGITDFAESVKGRFTISRDNSRNTLYLQMNSLRAEDTAVY |
| | scFc_delGK | molecule | FCARHDYSNYFFFDYWGQGTLVTVSSGGGGSGGGGSGGGGSDIQMTQ |
| | | | SPSSLSASVGDRVTITCRASQGISNYLAWYQQKPGKVPKLLIYAASI |
| | | | LQSGVPSKFSGSGSGTDFTLTISSLQPEDFAIYYCQQYFAYPITFGC |
| | | | GTRLEIKSGGGGSEVQLVESGGGLVQPGGSLKLSCAASGFTFNKYAM |
| | | | NWVRQAPGKGLEWVARIRSKYNNYATYYADSVKDRFTISRDDSKNTA |
| | | | YLQMNNLKTEDTAVYYCVRHGNFGNSYISYWAYWGQGTLVTVSSGGG |
| | | | GSGGGGSGGGGSQTVVTQEPSLTVSPGGTVTLTCGSSTGAVTSGNYP |
| | | | NWVQQKPGQAPRGLIGGTKFLAPGTPARFSGSLLGGKAALTLSGVQP |
| | | | EDEAEYYCVLWYSNRWVFGGGTKLTVLGGGGDKTHTCPPCPAPELLG |
| | | | GPSVFLFPPKPKDTLMISRTPEVTCVVVDVSHEDPEVKFNWYVDGVE |
| | | | VHNAKTKPCEEQYGSTYRCVSVLTVLHQDWLNGKEYKCKVSNKALPA |
| | | | PIEKTISKAKGQPREPQVYTLPPSREEMTKNQVSLTCLVKGFYPSDI |
| | | | AVEWESNGQPENNYKTTPPVLDSDGSFFLYSKLTVDKSRWQQGNVFS |
| | | | CSVMHEALHNHYTQKSLSLSPGGGGSGGGGSGGGGSGGGGSGGGGSG |
| | | | GGGSDKTHTCPPCPAPELLGGPSVFLFPPKPKDTLMISRTPEVTCVV |
| | | | VDVSHEDPEVKFNWYVDGVEVHNAKTKPCEEQYGSTYRCVSVLTVLH |
| | | | QDWLNGKEYKCKVSNKALPAPIEKTISKAKGQPREPQVYTLPPSREE |
| | | | MTKNQVSLTCLVKGFYPSDIAVEWESNGQPENNYKTTPPVLDSDGSF |
| | | | FLYSKLTVDKSRWQQGNVFSCSVMHEALHNHYTQKSLSLSPGK |
| 1239. | CD70_24xCD | bispecific | EVQLLESGGGLVQPGGSLRLSCAASGFTFSSYAMSWVRQAPGKGLEW |
| | 3-scFc_delGK | HLE | VSVISGSGGITDFAESVKGRFTISRDNSRNTLYLQMNSLRAEDTAVY |
| | | molecule | FCARHDYSNYFFFDYWGQGTLVTVSSGGGGSGGGGSGGGGSDIQMTQ |
| | | | SPSSLSASVGDRVTITCRASQGISNYLAWYQQKPGKVPKLLIYAASI |
| | | | LQSGVPSKFSGSGSGTDFTLTISSLQPEDFAIYYCQQYFAYPITFGQ |
| | | | GTRLEIKSGGGGSEVQLVESGGGLVQPGGSLKLSCAASGFTFNKYAM |
| | | | NWVRQAPGKGLEWVARIRSKYNNYATYYADSVKDRFTISRDDSKNTA |
| | | | YLQMNNLKTEDTAVYYCVRHGNFGNSYISYWAYWGQGTLVTVSSGGG |
| | | | GSGGGGSGGGGSQTVVTQEPSLTVSPGGTVTLTCGSSTGAVTSGNYP |
| | | | NWVQQKPGQAPRGLIGGTKFLAPGTPARFSGSLLGGKAALTLSGVQP |
| | | | EDEAEYYCVLWYSNRWVFGGGTKLTVLGGGGDKTHTCPPCPAPELLG |
| | | | GPSVFLFPPKPKDTLMISRTPEVTCVVVDVSHEDPEVKFNWYVDGVE |
| | | | VHNAKTKPCEEQYGSTYRCVSVLTVLHQDWLNGKEYKCKVSNKALPA |
| | | | PIEKTISKAKGQPREPQVYTLPPSREEMTKNQVSLTCLVKGFYPSDI |
| | | | AVEWESNGQPENNYKTTPPVLDSDGSFFLYSKLTVDKSRWQQGNVFS |
| | | | CSVMHEALHNHYTQKSLSLSPGGGGSGGGGSGGGGSGGGGSGGGGSG |
| | | | GGGSDKTHTCPPCPAPELLGGPSVFLFPPKPKDTLMISRTPEVTCVV |
| | | | VDVSHEDPEVKFNWYVDGVEVHNAKTKPCEEQYGSTYRCVSVLTVLH |
| | | | QDWLNGKEYKCKVSNKALPAPIEKTISKAKGQPREPQVYTLPPSREE |
| | | | MTKNQVSLTCLVKGFYPSDIAVEWESNGQPENNYKTTPPVLDSDGSF |
| | | | FLYSKLTVDKSRWQQGNVFSCSVMHEALHNHYTQKSLSLSPGK |
| 1240. | CD70_25_CC | bispecific | EVQLLESGGGMVQPGGSLRLSCAASGFTFSSYAMSWVRQAPGKCLEW |
| | xCD3- | HLE | VSAISGSGGRTFYAESVEGRFTISRDNSKNTLYLQMNSLRAEDTAVY |
| | scFc_delGK | molecule | YCAKHDYSNYPYFDYWGQGTLVTVSSGGGGSGGGGSGGGGSEIVLTQ |
| | | | SPGTLSLSPGERATLSCRASQSVRSSYLAWYQQKPGQAPRLLIYGAS |
| | | | SRATGIPDRFSGSGSGTDFTLTISRLEPEDFAVYFCQQYGSSPPTFG |
| | | | CGTRLEIKSGGGGSEVQLVESGGGLVQPGGSLKLSCAASGFTFNKYA |
| | | | MNWVRQAPGKGLEWVARIRSKYNNYATYYADSVKDRFTISRDDSKNT |
| | | | AYLQMNNLKTEDTAVYYCVRHGNFGNSYISYWAYWGQGTLVTVSSGG |
| | | | GGSGGGGSGGGGSQTVVTQEPSLTVSPGGTVTLTCGSSTGAVTSGNY |
| | | | PNWVQQKPGQAPRGLIGGTKFLAPGTPARFSGSLLGGKAALTLSGVQ |
| | | | PEDEAEYYCVLWYSNRWVFGGGTKLTVLGGGGDKTHTCPPCPAPELL |
| | | | GGPSVFLFPPKPKDTLMISRTPEVTCVVVDVSHEDPEVKFNWYVDGV |
| | | | EVHNAKTKPCEEQYGSTYRCVSVLTVLHQDWLNGKEYKCKVSNKALP |
| | | | APIEKTISKAKGQPREPQVYTLPPSREEMTKNQVSLTCLVKGFYPSD |
| | | | IAVEWESNGQPENNYKTTPPVLDSDGSFFLYSKLTVDKSRWQQGNVF |
| | | | SCSVMHEALHNHYTQKSLSLSPGGGGSGGGGSGGGGSGGGGSGGGGS |
| | | | GGGGSDKTHTCPPCPAPELLGGPSVFLFPPKPKDTLMISRTPEVTCV |
| | | | VVDVSHEDPEVKFNWYVDGVEVHNAKTKPCEEQYGSTYRCVSVLTVL |
| | | | HQDWLNGKEYKCKVSNKALPAPIEKTISKAKGQPREPQVYTLPPSRE |
| | | | EMTKNQVSLTCLVKGFYPSDIAVEWESNGQPENNYKTTPPVLDSDGS |
| | | | FFLYSKLTVDKSRWQQGNVFSCSVMHEALHNHYTQKSLSLSPGK |
| 1241. | CD70_25xCD | bispecific | EVQLLESGGGMVQPGGSLRLSCAASGFTFSSYAMSWVRQAPGKGLEW |
| | 3-scFc_delGK | HLE | VSAISGSGGRTFYAESVEGRFTISRDNSKNTLYLQMNSLRAEDTAVY |
| | | molecule | YCAKHDYSNYPYFDYWGQGTLVTVSSGGGGSGGGGSGGGGSEIVLTQ |
| | | | SPGTLSLSPGERATLSCRASQSVRSSYLAWYQQKPGQAPRLLIYGAS |
| | | | SRATGIPDRFSGSGSGTDFTLTISRLEPEDFAVYFCQQYGSSPPTFG |
| | | | GGTRLEIKSGGGGSEVQLVESGGGLVQPGGSLKLSCAASGFTFNKYA |
| | | | MNWVRQAPGKGLEWVARIRSKYNNYATYYADSVKDRFTISRDDSKNT |
| | | | AYLQMNNLKTEDTAVYYCVRHGNFGNSYISYWAYWGQGTLVTVSSGG |
| | | | GGSGGGGSGGGGSQTVVTQEPSLTVSPGGTVTLTCGSSTGAVTSGNY |
| | | | PNWVQQKPGQAPRGLIGGTKFLAPGTPARFSGSLLGGKAALTLSGVQ |
| | | | PEDEAEYYCVLWYSNRWVFGGGTKLTVLGGGGDKTHTCPPCPAPELL |
| | | | GGPSVFLFPPKPKDTLMISRTPEVTCVVVDVSHEDPEVKFNWYVDGV |
| | | | EVHNAKTKPCEEQYGSTYRCVSVLTVLHQDWLNGKEYKCKVSNKALP |
| | | | APIEKTISKAKGQPREPQVYTLPPSREEMTKNQVSLTCLVKGFYPSD |
| | | | IAVEWESNGQPENNYKTTPPVLDSDGSFFLYSKLTVDKSRWQQGNVF |
| | | | SCSVMHEALHNHYTQKSLSLSPGGGGSGGGGSGGGGSGGGGSGGGGS |
| | | | GGGGSDKTHTCPPCPAPELLGGPSVFLFPPKPKDTLMISRTPEVTCV |
| | | | VVDVSHEDPEVKFNWYVDGVEVHNAKTKPCEEQYGSTYRCVSVLTVL |
| | | | HQDWLNGKEYKCKVSNKALPAPIEKTISKAKGQPREPQVYTLPPSRE |
| | | | EMTKNQVSLTCLVKGFYPSDIAVEWESNGQPENNYKTTPPVLDSDGS |
| | | | FFLYSKLTVDKSRWQQGNVFSCSVMHEALHNHYTQKSLSLSPGK |
| 1242. | CD70_26_CC | bispecific | EVQLLESGGGLVQPGGSLRLSCAASGFTFSIYAMSWVRQAPGKCLEW |
| | xCD3- | HLE | VSAIGGSGGSTFYAESVKGRFTISRDNSKNTLYLQMNSLRAEDTAVY |
| | scFc_delGK | molecule | YCAKHDYSNYPYFDYWGQGTLVTVSSGGGGSGGGGSGGGGSEIVLTQ |
| | | | SPGTLSLSPGERATLSCRASQSVRSSYVAWYQQKPGQAPRLLIYGAS |
| | | | SRATGIPDRFSGSGSGTDFTLTISRLEPEDFAVYYCQQYGDLPFTFG |
| | | | CGTRLEIKSGGGGSEVQLVESGGGLVQPGGSLKLSCAASGFTFNKYA |
| | | | MNWVRQAPGKGLEWVARIRSKYNNYATYYADSVKDRFTISRDDSKNT |
| | | | AYLQMNNLKTEDTAVYYCVRHGNFGNSYISYWAYWGQGTLVTVSSGG |
| | | | GGSGGGGSGGGGSQTVVTQEPSLTVSPGGTVTLTCGSSTGAVTSGNY |
| | | | PNWVQQKPGQAPRGLIGGTKFLAPGTPARFSGSLLGGKAALTLSGVQ |
| | | | PEDEAEYYCVLWYSNRWVFGGGTKLTVLGGGGDKTHTCPPCPAPELL |
| | | | GGPSVFLFPPKPKDTLMISRTPEVTCVVVDVSHEDPEVKFNWYVDGV |
| | | | EVHNAKTKPCEEQYGSTYRCVSVLTVLHQDWLNGKEYKCKVSNKALP |
| | | | APIEKTISKAKGQPREPQVYTLPPSREEMTKNQVSLTCLVKGFYPSD |
| | | | IAVEWESNGQPENNYKTTPPVLDSDGSFFLYSKLTVDKSRWQQGNVF |
| | | | SCSVMHEALHNHYTQKSLSLSPGGGGSGGGGSGGGGSGGGGSGGGGS |
| | | | GGGGSDKTHTCPPCPAPELLGGPSVFLFPPKPKDTLMISRTPEVTCV |
| | | | VVDVSHEDPEVKFNWYVDGVEVHNAKTKPCEEQYGSTYRCVSVLTVL |
| | | | HQDWLNGKEYKCKVSNKALPAPIEKTISKAKGQPREPQVYTLPPSRE |
| | | | EMTKNQVSLTCLVKGFYPSDIAVEWESNGQPENNYKTTPPVLDSDGS |
| | | | FFLYSKLTVDKSRWQQGNVFSCSVMHEALHNHYTQKSLSLSPGK |
| 1243. | CD70_26xCD | bispecific | EVQLLESGGGLVQPGGSLRLSCAASGFTFSIYAMSWVRQAPGKGLEW |
| | 3-scFc_delGK | HLE | VSAIGGSGGSTFYAESVKGRFTISRDNSKNTLYLQMNSLRAEDTAVY |
| | | molecule | YCAKHDYSNYPYFDYWGQGTLVTVSSGGGGSGGGGSGGGGSEIVLTQ |
| | | | SPGTLSLSPGERATLSCRASQSVRSSYVAWYQQKPGQAPRLLIYGAS |
| | | | SRATGIPDRFSGSGSGTDFTLTISRLEPEDFAVYYCQQYGDLPFTFG |
| | | | PGTRLEIKSGGGGSEVQLVESGGGLVQPGGSLKLSCAASGFTFNKYA |
| | | | MNWVRQAPGKGLEWVARIRSKYNNYATYYADSVKDRFTISRDDSKNT |
| | | | AYLQMNNLKTEDTAVYYCVRHGNFGNSYISYWAYWGQGTLVTVSSGG |
| | | | GGSGGGGSGGGGSQTVVTQEPSLTVSPGGTVTLTCGSSTGAVTSGNY |
| | | | PNWVQQKPGQAPRGLIGGTKFLAPGTPARFSGSLLGGKAALTLSGVQ |
| | | | PEDEAEYYCVLWYSNRWVFGGGTKLTVLGGGGDKTHTCPPCPAPELL |
| | | | GGPSVFLFPPKPKDTLMISRTPEVTCVVVDVSHEDPEVKFNWYVDGV |
| | | | EVHNAKTKPCEEQYGSTYRCVSVLTVLHQDWLNGKEYKCKVSNKALP |
| | | | APIEKTISKAKGQPREPQVYTLPPSREEMTKNQVSLTCLVKGFYPSD |
| | | | IAVEWESNGQPENNYKTTPPVLDSDGSFFLYSKLTVDKSRWQQGNVF |
| | | | SCSVMHEALHNHYTQKSLSLSPGGGGSGGGGSGGGGSGGGGSGGGGS |
| | | | GGGGSDKTHTCPPCPAPELLGGPSVFLFPPKPKDTLMISRTPEVTCV |
| | | | VVDVSHEDPEVKFNWYVDGVEVHNAKTKPCEEQYGSTYRCVSVLTVL |
| | | | HQDWLNGKEYKCKVSNKALPAPIEKTISKAKGQPREPQVYTLPPSRE |
| | | | EMTKNQVSLTCLVKGFYPSDIAVEWESNGQPENNYKTTPPVLDSDGS |
| | | | FFLYSKLTVDKSRWQQGNVFSCSVMHEALHNHYTQKSLSLSPGK |
| 1244. | CD70_27_CC | bispecific | QVQLQESGPGLVKPSQTLSLTCTVSGGSISSSSYYWGWIRQPPGKCL |
| | xCD3- | HLE | EWIGSIYHSGGTYFNPSLKSRVTISVDTSKNQFSLKLSSVTAADTAV |
| | scFc_delGK | molecule | YYCARHYEILTGYYPDVFDIWGQGTMVTVSSGGGGSGGGGSGGGGSD |
| | | | IQMTQSPSSLSASVGDRVTITCRASQSISSYLNWYQQKPGKAPKLLI |
| | | | YAASNLQSGVSSRFSGSGSGTDFTLTISSLQPEDFATYYCQQSFSSP |
| | | | RTFGCGTKVEIKSGGGGSEVQLVESGGGLVQPGGSLKLSCAASGFTF |
| | | | NKYAMNWVRQAPGKGLEWVARIRSKYNNYATYYADSVKDRFTISRDD |
| | | | SKNTAYLQMNNLKTEDTAVYYCVRHGNFGNSYISYWAYWGQGTLVTV |
| | | | SSGGGGSGGGGSGGGGSQTVVTQEPSLTVSPGGTVTLTCGSSTGAVT |
| | | | SGNYPNWVQQKPGQAPRGLIGGTKFLAPGTPARFSGSLLGGKAALTL |
| | | | SGVQPEDEAEYYCVLWYSNRWVFGGGTKLTVLGGGGDKTHTCPPCPA |
| | | | PELLGGPSVFLFPPKPKDTLMISRTPEVTCVVVDVSHEDPEVKFNWY |
| | | | VDGVEVHNAKTKPCEEQYGSTYRCVSVLTVLHQDWLNGKEYKCKVSN |
| | | | KALPAPIEKTISKAKGQPREPQVYTLPPSREEMTKNQVSLTCLVKGF |
| | | | YPSDIAVEWESNGQPENNYKTTPPVLDSDGSFFLYSKLTVDKSRWQQ |
| | | | GNVFSCSVMHEALHNHYTQKSLSLSPGGGGSGGGGSGGGGSGGGGSG |
| | | | GGGSGGGGSDKTHTCPPCPAPELLGGPSVFLFPPKPKDTLMISRTPE |
| | | | VTCVVVDVSHEDPEVKFNWYVDGVEVHNAKTKPCEEQYGSTYRCVSV |
| | | | LTVLHQDWLNGKEYKCKVSNKALPAPIEKTISKAKGQPREPQVYTLP |
| | | | PSREEMTKNQVSLTCLVKGFYPSDIAVEWESNGQPENNYKTTPPVLD |
| | | | SDGSFFLYSKLTVDKSRWQQGNVFSCSVMHEALHNHYTQKSLSLSPG |
| | | | K |
| 1245. | CD70_27xCD | bispecific | QVQLQESGPGLVKPSQTLSLTCTVSGGSISSSSYYWGWIRQPPGKGL |
| | 3-scFc_delGK | HLE | EWIGSIYHSGGTYFNPSLKSRVTISVDTSKNQFSLKLSSVTAADTAV |
| | | molecule | YYCARHYEILTGYYPDVFDIWGQGTMVTVSSGGGGSGGGGSGGGGSD |
| | | | IQMTQSPSSLSASVGDRVTITCRASQSISSYLNWYQQKPGKAPKLLI |
| | | | YAASNLQSGVSSRFSGSGSGTDFTLTISSLQPEDFATYYCQQSFSSP |
| | | | RTFGQGTKVEIKSGGGGSEVQLVESGGGLVQPGGSLKLSCAASGFTF |
| | | | NKYAMNWVRQAPGKGLEWVARIRSKYNNYATYYADSVKDRFTISRDD |
| | | | SKNTAYLQMNNLKTEDTAVYYCVRHGNFGNSYISYWAYWGQGTLVTV |
| | | | SSGGGGSGGGGSGGGGSQTVVTQEPSLTVSPGGTVTLTCGSSTGAVT |
| | | | SGNYPNWVQQKPGQAPRGLIGGTKFLAPGTPARFSGSLLGGKAALTL |
| | | | SGVQPEDEAEYYCVLWYSNRWVFGGGTKLTVLGGGGDKTHTCPPCPA |
| | | | PELLGGPSVFLFPPKPKDTLMISRTPEVTCVVVDVSHEDPEVKFNWY |
| | | | VDGVEVHNAKTKPCEEQYGSTYRCVSVLTVLHQDWLNGKEYKCKVSN |
| | | | KALPAPIEKTISKAKGQPREPQVYTLPPSREEMTKNQVSLTCLVKGF |
| | | | YPSDIAVEWESNGQPENNYKTTPPVLDSDGSFFLYSKLTVDKSRWQQ |
| | | | GNVFSCSVMHEALHNHYTQKSLSLSPGGGGSGGGGSGGGGSGGGGSG |
| | | | GGGSGGGGSDKTHTCPPCPAPELLGGPSVFLFPPKPKDTLMISRTPE |
| | | | VTCVVVDVSHEDPEVKFNWYVDGVEVHNAKTKPCEEQYGSTYRCVSV |
| | | | LTVLHQDWLNGKEYKCKVSNKALPAPIEKTISKAKGQPREPQVYTLP |
| | | | PSREEMTKNQVSLTCLVKGFYPSDIAVEWESNGQPENNYKTTPPVLD |
| | | | SDGSFFLYSKLTVDKSRWQQGNVFSCSVMHEALHNHYTQKSLSLSPG |
| | | | K |
| 1246. | CD70_28_CC | bispecific | EVQLVESGGGLVKPGGSLRLSCAASGFTFSSYSMNWVRQAPGKCLEW |
| | xCD3- | HLE | VSYISSSGGYIYYAESVKGRFTISRDNAKNSLYLQMNSLRAEDAAVY |
| | scFc_delGK | molecule | YCSRGDYSNYAYFDYWGQGTLVTVSSGGGGSGGGGSGGGGSDIQMTQ |
| | | | SPSSLSASVGDRVTITCRASQGISNYLAWYQQKPGKVPKLLIYAAST |
| | | | LQSGVPSRFSGSGSGTDFTLTISSLQAEDVAVYYCQQYYSTPLTFGC |
| | | | GTKVEIKSGGGGSEVQLVESGGGLVQPGGSLKLSCAASGFTFNKYAM |
| | | | NWVRQAPGKGLEWVARIRSKYNNYATYYADSVKDRFTISRDDSKNTA |
| | | | YLQMNNLKTEDTAVYYCVRHGNFGNSYISYWAYWGQGTLVTVSSGGG |
| | | | GSGGGGSGGGGSQTVVTQEPSLTVSPGGTVTLTCGSSTGAVTSGNYP |
| | | | NWVQQKPGQAPRGLIGGTKFLAPGTPARFSGSLLGGKAALTLSGVQP |
| | | | EDEAEYYCVLWYSNRWVFGGGTKLTVLGGGGDKTHTCPPCPAPELLG |
| | | | GPSVFLFPPKPKDTLMISRTPEVTCVVVDVSHEDPEVKFNWYVDGVE |
| | | | VHNAKTKPCEEQYGSTYRCVSVLTVLHQDWLNGKEYKCKVSNKALPA |
| | | | PIEKTISKAKGQPREPQVYTLPPSREEMTKNQVSLTCLVKGFYPSDI |
| | | | AVEWESNGQPENNYKTTPPVLDSDGSFFLYSKLTVDKSRWQQGNVFS |
| | | | CSVMHEALHNHYTQKSLSLSPGGGGSGGGGSGGGGSGGGGSGGGGSG |
| | | | GGGSDKTHTCPPCPAPELLGGPSVFLFPPKPKDTLMISRTPEVTCVV |
| | | | VDVSHEDPEVKFNWYVDGVEVHNAKTKPCEEQYGSTYRCVSVLTVLH |
| | | | QDWLNGKEYKCKVSNKALPAPIEKTISKAKGQPREPQVYTLPPSREE |
| | | | MTKNQVSLTCLVKGFYPSDIAVEWESNGQPENNYKTTPPVLDSDGSF |
| | | | FLYSKLTVDKSRWQQGNVFSCSVMHEALHNHYTQKSLSLSPGK |
| 1247. | CD70_28xCD | bispecific | EVQLVESGGGLVKPGGSLRLSCAASGFTFSSYSMNWVRQAPGKGLEW |
| | 3-scFc_delGK | HLE | VSYISSSGGYIYYAESVKGRFTISRDNAKNSLYLQMNSLRAEDAAVY |
| | | molecule | YCSRGDYSNYAYFDYWGQGTLVTVSSGGGGSGGGGSGGGGSDIQMTQ |
| | | | SPSSLSASVGDRVTITCRASQGISNYLAWYQQKPGKVPKLLIYAAST |
| | | | LQSGVPSRFSGSGSGTDFTLTISSLQAEDVAVYYCQQYYSTPLTFGG |
| | | | GTKVEIKSGGGGSEVQLVESGGGLVQPGGSLKLSCAASGFTFNKYAM |
| | | | NWVRQAPGKGLEWVARIRSKYNNYATYYADSVKDRFTISRDDSKNTA |
| | | | YLQMNNLKTEDTAVYYCVRHGNFGNSYISYWAYWGQGTLVTVSSGGG |
| | | | GSGGGGSGGGGSQTVVTQEPSLTVSPGGTVTLTCGSSTGAVTSGNYP |
| | | | NWVQQKPGQAPRGLIGGTKFLAPGTPARFSGSLLGGKAALTLSGVQP |
| | | | EDEAEYYCVLWYSNRWVFGGGTKLTVLGGGGDKTHTCPPCPAPELLG |
| | | | GPSVFLFPPKPKDTLMISRTPEVTCVVVDVSHEDPEVKFNWYVDGVE |
| | | | VHNAKTKPCEEQYGSTYRCVSVLTVLHQDWLNGKEYKCKVSNKALPA |
| | | | PIEKTISKAKGQPREPQVYTLPPSREEMTKNQVSLTCLVKGFYPSDI |
| | | | AVEWESNGQPENNYKTTPPVLDSDGSFFLYSKLTVDKSRWQQGNVFS |
| | | | CSVMHEALHNHYTQKSLSLSPGGGGSGGGGSGGGGSGGGGSGGGGSG |
| | | | GGGSDKTHTCPPCPAPELLGGPSVFLFPPKPKDTLMISRTPEVTCVV |
| | | | VDVSHEDPEVKFNWYVDGVEVHNAKTKPCEEQYGSTYRCVSVLTVLH |
| | | | QDWLNGKEYKCKVSNKALPAPIEKTISKAKGQPREPQVYTLPPSREE |
| | | | MTKNQVSLTCLVKGFYPSDIAVEWESNGQPENNYKTTPPVLDSDGSF |
| | | | FLYSKLTVDKSRWQQGNVFSCSVMHEALHNHYTQKSLSLSPGK |
| 1248. | CD70_29_CC | bispecific | EVQLLESGGGLVQPGGSLRLSCAASGFTFSVYAMSWVRQAPGKCLEW |
| | xCD3- | HLE | VSTISGSGGSTFYAESVKGRFTISRDNSKNTLYLQMNRLRAEDTAVY |
| | scFc_delGK | molecule | YCARHDYSNYAYFDYWGQGTLVTVSSGGGGSGGGGSGGGGSEIVLTQ |
| | | | SPGTLSLSPGERATLSCRASQSVRSSYLAWYQQKPGQAPRLLIYGAS |
| | | | SRATGIPDRFSGSGSGTDFTLTISRLEPEDFAVYYCQQYGDLPFTFG |
| | | | CGTKVEIKSGGGGSEVQLVESGGGLVQPGGSLKLSCAASGFTFNKYA |
| | | | MNWVRQAPGKGLEWVARIRSKYNNYATYYADSVKDRFTISRDDSKNT |
| | | | AYLQMNNLKTEDTAVYYCVRHGNFGNSYISYWAYWGQGTLVTVSSGG |
| | | | GGSGGGGSGGGGSQTVVTQEPSLTVSPGGTVTLTCGSSTGAVTSGNY |
| | | | PNWVQQKPGQAPRGLIGGTKFLAPGTPARFSGSLLGGKAALTLSGVQ |
| | | | PEDEAEYYCVLWYSNRWVFGGGTKLTVLGGGGDKTHTCPPCPAPELL |
| | | | GGPSVFLFPPKPKDTLMISRTPEVTCVVVDVSHEDPEVKFNWYVDGV |
| | | | EVHNAKTKPCEEQYGSTYRCVSVLTVLHQDWLNGKEYKCKVSNKALP |
| | | | APIEKTISKAKGQPREPQVYTLPPSREEMTKNQVSLTCLVKGFYPSD |
| | | | IAVEWESNGQPENNYKTTPPVLDSDGSFFLYSKLTVDKSRWQQGNVF |
| | | | SCSVMHEALHNHYTQKSLSLSPGGGGSGGGGSGGGGSGGGGSGGGGS |
| | | | GGGGSDKTHTCPPCPAPELLGGPSVFLFPPKPKDTLMISRTPEVTCV |
| | | | VVDVSHEDPEVKFNWYVDGVEVHNAKTKPCEEQYGSTYRCVSVLTVL |
| | | | HQDWLNGKEYKCKVSNKALPAPIEKTISKAKGQPREPQVYTLPPSRE |
| | | | EMTKNQVSLTCLVKGFYPSDIAVEWESNGQPENNYKTTPPVLDSDGS |
| | | | FFLYSKLTVDKSRWQQGNVFSCSVMHEALHNHYTQKSLSLSPGK |
| 1249. | CD70_29xCD | bispecific | EVQLLESGGGLVQPGGSLRLSCAASGFTFSVYAMSWVRQAPGKGLEW |
| | 3-scFc_delGK | HLE | VSTISGSGGSTFYAESVKGRFTISRDNSKNTLYLQMNRLRAEDTAVY |
| | | molecule | YCARHDYSNYAYFDYWGQGTLVTVSSGGGGSGGGGSGGGGSEIVLTQ |
| | | | SPGTLSLSPGERATLSCRASQSVRSSYLAWYQQKPGQAPRLLIYGAS |
| | | | SRATGIPDRFSGSGSGTDFTLTISRLEPEDFAVYYCQQYGDLPFTFG |
| | | | PGTKVEIKSGGGGSEVQLVESGGGLVQPGGSLKLSCAASGFTFNKYA |
| | | | MNWVRQAPGKGLEWVARIRSKYNNYATYYADSVKDRFTISRDDSKNT |
| | | | AYLQMNNLKTEDTAVYYCVRHGNFGNSYISYWAYWGQGTLVTVSSGG |
| | | | GGSGGGGSGGGGSQTVVTQEPSLTVSPGGTVTLTCGSSTGAVTSGNY |
| | | | PNWVQQKPGQAPRGLIGGTKFLAPGTPARFSGSLLGGKAALTLSGVQ |
| | | | PEDEAEYYCVLWYSNRWVFGGGTKLTVLGGGGDKTHTCPPCPAPELL |
| | | | GGPSVFLFPPKPKDTLMISRTPEVTCVVVDVSHEDPEVKFNWYVDGV |
| | | | EVHNAKTKPCEEQYGSTYRCVSVLTVLHQDWLNGKEYKCKVSNKALP |
| | | | APIEKTISKAKGQPREPQVYTLPPSREEMTKNQVSLTCLVKGFYPSD |
| | | | IAVEWESNGQPENNYKTTPPVLDSDGSFFLYSKLTVDKSRWQQGNVF |
| | | | SCSVMHEALHNHYTQKSLSLSPGGGGSGGGGSGGGGSGGGGSGGGGS |
| | | | GGGGSDKTHTCPPCPAPELLGGPSVFLFPPKPKDTLMISRTPEVTCV |
| | | | VVDVSHEDPEVKFNWYVDGVEVHNAKTKPCEEQYGSTYRCVSVLTVL |
| | | | HQDWLNGKEYKCKVSNKALPAPIEKTISKAKGQPREPQVYTLPPSRE |
| | | | EMTKNQVSLTCLVKGFYPSDIAVEWESNGQPENNYKTTPPVLDSDGS |
| | | | FFLYSKLTVDKSRWQQGNVFSCSVMHEALHNHYTQKSLSLSPGK |
| 1250. | CD70_30_CC | bispecific | QVQLVESGGGVVQPGRSLRLSCAASGFMFSSYGMHWVRQAPGKCLEW |
| | xCD3- | HLE | VAVISYEGSNKYYAESVKGRFTISRDNSKNTLYLQMNSLRAEDTAVY |
| | scFc_delGK | molecule | YCARGRYYGSGNYNHGMDVWGQGTTVTVSSGGGGSGGGGSGGGGSDI |
| | | | QMTQSPSSLSASVGDRVTITCRASQSISSYLNWYQQKPGKAPKLLIY |
| | | | AASSLQSGVPSRFSGRGSGTDFTLTISSLQPEDFATYYCQQSYSTPF |
| | | | TFGCGTKVEIKSGGGGSEVQLVESGGGLVQPGGSLKLSCAASGFTFN |
| | | | KYAMNWVRQAPGKGLEWVARIRSKYNNYATYYADSVKDRFTISRDDS |
| | | | KNTAYLQMNNLKTEDTAVYYCVRHGNFGNSYISYWAYWGQGTLVTVS |
| | | | SGGGGSGGGGSGGGGSQTVVTQEPSLTVSPGGTVTLTCGSSTGAVTS |
| | | | GNYPNWVQQKPGQAPRGLIGGTKFLAPGTPARFSGSLLGGKAALTLS |
| | | | GVQPEDEAEYYCVLWYSNRWVFGGGTKLTVLGGGGDKTHTCPPCPAP |
| | | | ELLGGPSVFLFPPKPKDTLMISRTPEVTCVVVDVSHEDPEVKFNWYV |
| | | | DGVEVHNAKTKPCEEQYGSTYRCVSVLTVLHQDWLNGKEYKCKVSNK |
| | | | ALPAPIEKTISKAKGQPREPQVYTLPPSREEMTKNQVSLTCLVKGFY |
| | | | PSDIAVEWESNGQPENNYKTTPPVLDSDGSFFLYSKLTVDKSRWQQG |
| | | | NVFSCSVMHEALHNHYTQKSLSLSPGGGGSGGGGSGGGGSGGGGSGG |
| | | | GGSGGGGSDKTHTCPPCPAPELLGGPSVFLFPPKPKDTLMISRTPEV |
| | | | TCVVVDVSHEDPEVKFNWYVDGVEVHNAKTKPCEEQYGSTYRCVSVL |
| | | | TVLHQDWLNGKEYKCKVSNKALPAPIEKTISKAKGQPREPQVYTLPP |
| | | | SREEMTKNQVSLTCLVKGFYPSDIAVEWESNGQPENNYKTTPPVLDS |
| | | | DGSFFLYSKLTVDKSRWQQGNVFSCSVMHEALHNHYTQKSLSLSPGK |
| 1251. | CD70_30xCD | bispecific | QVQLVESGGGVVQPGRSLRLSCAASGFMFSSYGMHWVRQAPGKGLEW |
| | 3-scFc_delGK | HLE | VAVISYEGSNKYYAESVKGRFTISRDNSKNTLYLQMNSLRAEDTAVY |
| | | molecule | YCARGRYYGSGNYNHGMDVWGQGTTVTVSSGGGGSGGGGSGGGGSDI |
| | | | QMTQSPSSLSASVGDRVTITCRASQSISSYLNWYQQKPGKAPKLLIY |
| | | | AASSLQSGVPSRFSGRGSGTDFTLTISSLQPEDFATYYCQQSYSTPF |
| | | | TFGPGTKVEIKSGGGGSEVQLVESGGGLVQPGGSLKLSCAASGFTFN |
| | | | KYAMNWVRQAPGKGLEWVARIRSKYNNYATYYADSVKDRFTISRDDS |
| | | | KNTAYLQMNNLKTEDTAVYYCVRHGNFGNSYISYWAYWGQGTLVTVS |
| | | | SGGGGSGGGGSGGGGSQTVVTQEPSLTVSPGGTVTLTCGSSTGAVTS |
| | | | GNYPNWVQQKPGQAPRGLIGGTKFLAPGTPARFSGSLLGGKAALTLS |
| | | | GVQPEDEAEYYCVLWYSNRWVFGGGTKLTVLGGGGDKTHTCPPCPAP |
| | | | ELLGGPSVFLFPPKPKDTLMISRTPEVTCVVVDVSHEDPEVKFNWYV |
| | | | DGVEVHNAKTKPCEEQYGSTYRCVSVLTVLHQDWLNGKEYKCKVSNK |
| | | | ALPAPIEKTISKAKGQPREPQVYTLPPSREEMTKNQVSLTCLVKGFY |
| | | | PSDIAVEWESNGQPENNYKTTPPVLDSDGSFFLYSKLTVDKSRWQQG |
| | | | NVFSCSVMHEALHNHYTQKSLSLSPGGGGSGGGGSGGGGSGGGGSGG |
| | | | GGSGGGGSDKTHTCPPCPAPELLGGPSVFLFPPKPKDTLMISRTPEV |
| | | | TCVVVDVSHEDPEVKFNWYVDGVEVHNAKTKPCEEQYGSTYRCVSVL |
| | | | TVLHQDWLNGKEYKCKVSNKALPAPIEKTISKAKGQPREPQVYTLPP |
| | | | SREEMTKNQVSLTCLVKGFYPSDIAVEWESNGQPENNYKTTPPVLDS |
| | | | DGSFFLYSKLTVDKSRWQQGNVFSCSVMHEALHNHYTQKSLSLSPGK |
| 1252. | CD70_31_CC | bispecific | QVQLVESGGGVVQPGRSLRLSCAASGFTFSSYGMHWVRQAPGKCLEW |
| | xCD3- | HLE | VAVTWYDASNKYYGDAVKGRFTISRDNSKNTLYLQMNSLRAEDTAVY |
| | scFc_delGK | molecule | YCARDLLRGVKGYAMDVWGQGTTVTVSSGGGGSGGGGSGGGGSEIVL |
| | | | TQSPGTLSLSPGERATLSCRASQSLRRIYLAWYQQKPGQAPRLLIYD |
| | | | VFDRATGIPDRFSGGGSGTDFTLTISRLEPEDFAVYYCQQYSESPFT |
| | | | FGCGTKVDIKSGGGGSEVQLVESGGGLVQPGGSLKLSCAASGFTFNK |
| | | | YAMNWVRQAPGKGLEWVARIRSKYNNYATYYADSVKDRFTISRDDSK |
| | | | NTAYLQMNNLKTEDTAVYYCVRHGNFGNSYISYWAYWGQGTLVTVSS |
| | | | GGGGSGGGGSGGGGSQTVVTQEPSLTVSPGGTVTLTCGSSTGAVTSG |
| | | | NYPNWVQQKPGQAPRGLIGGTKFLAPGTPARFSGSLLGGKAALTLSG |
| | | | VQPEDEAEYYCVLWYSNRWVFGGGTKLTVLGGGGDKTHTCPPCPAPE |
| | | | LLGGPSVFLFPPKPKDTLMISRTPEVTCVVVDVSHEDPEVKFNWYVD |
| | | | GVEVHNAKTKPCEEQYGSTYRCVSVLTVLHQDWLNGKEYKCKVSNKA |
| | | | LPAPIEKTISKAKGQPREPQVYTLPPSREEMTKNQVSLTCLVKGFYP |
| | | | SDIAVEWESNGQPENNYKTTPPVLDSDGSFFLYSKLTVDKSRWQQGN |
| | | | VFSCSVMHEALHNHYTQKSLSLSPGGGGSGGGGSGGGGSGGGGSGGG |
| | | | GSGGGGSDKTHTCPPCPAPELLGGPSVFLFPPKPKDTLMISRTPEVT |
| | | | CVVVDVSHEDPEVKFNWYVDGVEVHNAKTKPCEEQYGSTYRCVSVLT |
| | | | VLHQDWLNGKEYKCKVSNKALPAPIEKTISKAKGQPREPQVYTLPPS |
| | | | REEMTKNQVSLTCLVKGFYPSDIAVEWESNGQPENNYKTTPPVLDSD |
| | | | GSFFLYSKLTVDKSRWQQGNVFSCSVMHEALHNHYTQKSLSLSPGK |
| 1253. | CD70_31xCD | bispecific | QVQLVESGGGVVQPGRSLRLSCAASGFTFSSYGMHWVRQAPGKGLEW |
| | 3-scFc_delGK | HLE | VAVTWYDASNKYYGDAVKGRFTISRDNSKNTLYLQMNSLRAEDTAVY |
| | | molecule | YCARDLLRGVKGYAMDVWGQGTTVTVSSGGGGSGGGGSGGGGSEIVL |
| | | | TQSPGTLSLSPGERATLSCRASQSLRRIYLAWYQQKPGQAPRLLIYD |
| | | | VFDRATGIPDRFSGGGSGTDFTLTISRLEPEDFAVYYCQQYSESPFT |
| | | | FGPGTKVDIKSGGGGSEVQLVESGGGLVQPGGSLKLSCAASGFTFNK |
| | | | YAMNWVRQAPGKGLEWVARIRSKYNNYATYYADSVKDRFTISRDDSK |
| | | | NTAYLQMNNLKTEDTAVYYCVRHGNFGNSYISYWAYWGQGTLVTVSS |
| | | | GGGGSGGGGSGGGGSQTVVTQEPSLTVSPGGTVTLTCGSSTGAVTSG |
| | | | NYPNWVQQKPGQAPRGLIGGTKFLAPGTPARFSGSLLGGKAALTLSG |
| | | | VQPEDEAEYYCVLWYSNRWVFGGGTKLTVLGGGGDKTHTCPPCPAPE |
| | | | LLGGPSVFLFPPKPKDTLMISRTPEVTCVVVDVSHEDPEVKFNWYVD |
| | | | GVEVHNAKTKPCEEQYGSTYRCVSVLTVLHQDWLNGKEYKCKVSNKA |
| | | | LPAPIEKTISKAKGQPREPQVYTLPPSREEMTKNQVSLTCLVKGFYP |
| | | | SDIAVEWESNGQPENNYKTTPPVLDSDGSFFLYSKLTVDKSRWQQGN |
| | | | VFSCSVMHEALHNHYTQKSLSLSPGGGGSGGGGSGGGGSGGGGSGGG |
| | | | GSGGGGSDKTHTCPPCPAPELLGGPSVFLFPPKPKDTLMISRTPEVT |
| | | | CVVVDVSHEDPEVKFNWYVDGVEVHNAKTKPCEEQYGSTYRCVSVLT |
| | | | VLHQDWLNGKEYKCKVSNKALPAPIEKTISKAKGQPREPQVYTLPPS |
| | | | REEMTKNQVSLTCLVKGFYPSDIAVEWESNGQPENNYKTTPPVLDSD |
| | | | GSFFLYSKLTVDKSRWQQGNVFSCSVMHEALHNHYTQKSLSLSPGK |
| 1254. | CD70_32_CC | bispecific | QVQLVQSGAEVKKPGASVKVSCKASGYTFTSYGISWVRQAPGQCLEW |
| | xCD3- | HLE | MGWISAYQGYTHYAQKLQGRVTMTTDTSTSTAYMELRSLRSDDTAVY |
| | scFc_delGK | molecule | YCARDYGGNDYYGMDVWGQGTTVTVSSGGGGSGGGGSGGGGSQSVLT |
| | | | QPPSASGTPGQRVTISCSGSSSNIGINYVYWYQQLPGTAPKLLIYRS |
| | | | DQRPSGVPDRFSGSKSGTSASLALSGLRSEDEADYYCAAFDESLSGV |
| | | | VFGCGTKLTVLSGGGGSEVQLVESGGGLVQPGGSLKLSCAASGFTFN |
| | | | KYAMNWVRQAPGKGLEWVARIRSKYNNYATYYADSVKDRFTISRDDS |
| | | | KNTAYLQMNNLKTEDTAVYYCVRHGNFGNSYISYWAYWGQGTLVTVS |
| | | | SGGGGSGGGGSGGGGSQTVVTQEPSLTVSPGGTVTLTCGSSTGAVTS |
| | | | GNYPNWVQQKPGQAPRGLIGGTKFLAPGTPARFSGSLLGGKAALTLS |
| | | | GVQPEDEAEYYCVLWYSNRWVFGGGTKLTVLGGGGDKTHTCPPCPAP |
| | | | ELLGGPSVFLFPPKPKDTLMISRTPEVTCVVVDVSHEDPEVKFNWYV |
| | | | DGVEVHNAKTKPCEEQYGSTYRCVSVLTVLHQDWLNGKEYKCKVSNK |
| | | | ALPAPIEKTISKAKGQPREPQVYTLPPSREEMTKNQVSLTCLVKGFY |
| | | | PSDIAVEWESNGQPENNYKTTPPVLDSDGSFFLYSKLTVDKSRWQQG |
| | | | NVFSCSVMHEALHNHYTQKSLSLSPGGGGSGGGGSGGGGSGGGGSGG |
| | | | GGSGGGGSDKTHTCPPCPAPELLGGPSVFLFPPKPKDTLMISRTPEV |
| | | | TCVVVDVSHEDPEVKFNWYVDGVEVHNAKTKPCEEQYGSTYRCVSVL |
| | | | TVLHQDWLNGKEYKCKVSNKALPAPIEKTISKAKGQPREPQVYTLPP |
| | | | SREEMTKNQVSLTCLVKGFYPSDIAVEWESNGQPENNYKTTPPVLDS |
| | | | DGSFFLYSKLTVDKSRWQQGNVFSCSVMHEALHNHYTQKSLSLSPGK |
| 1255. | CD70_32xCD | bispecific | QVQLVQSGAEVKKPGASVKVSCKASGYTFTSYGISWVRQAPGQGLEW |
| | 3-scFc_delGK | HLE | MGWISAYQGYTHYAQKLQGRVTMTTDTSTSTAYMELRSLRSDDTAVY |
| | | molecule | YCARDYGGNDYYGMDVWGQGTTVTVSSGGGGSGGGGSGGGGSQSVLT |
| | | | QPPSASGTPGQRVTISCSGSSSNIGINYVYWYQQLPGTAPKLLIYRS |
| | | | DQRPSGVPDRFSGSKSGTSASLALSGLRSEDEADYYCAAFDESLSGV |
| | | | VFGGGTKLTVLSGGGGSEVQLVESGGGLVQPGGSLKLSCAASGFTFN |
| | | | KYAMNWVRQAPGKGLEWVARIRSKYNNYATYYADSVKDRFTISRDDS |
| | | | KNTAYLQMNNLKTEDTAVYYCVRHGNFGNSYISYWAYWGQGTLVTVS |
| | | | SGGGGSGGGGSGGGGSQTVVTQEPSLTVSPGGTVTLTCGSSTGAVTS |
| | | | GNYPNWVQQKPGQAPRGLIGGTKFLAPGTPARFSGSLLGGKAALTLS |
| | | | GVQPEDEAEYYCVLWYSNRWVFGGGTKLTVLGGGGDKTHTCPPCPAP |
| | | | ELLGGPSVFLFPPKPKDTLMISRTPEVTCVVVDVSHEDPEVKFNWYV |
| | | | DGVEVHNAKTKPCEEQYGSTYRCVSVLTVLHQDWLNGKEYKCKVSNK |
| | | | ALPAPIEKTISKAKGQPREPQVYTLPPSREEMTKNQVSLTCLVKGFY |
| | | | PSDIAVEWESNGQPENNYKTTPPVLDSDGSFFLYSKLTVDKSRWQQG |
| | | | NVFSCSVMHEALHNHYTQKSLSLSPGGGGSGGGGSGGGGSGGGGSGG |
| | | | GGSGGGGSDKTHTCPPCPAPELLGGPSVFLFPPKPKDTLMISRTPEV |
| | | | TCVVVDVSHEDPEVKFNWYVDGVEVHNAKTKPCEEQYGSTYRCVSVL |
| | | | TVLHQDWLNGKEYKCKVSNKALPAPIEKTISKAKGQPREPQVYTLPP |
| | | | SREEMTKNQVSLTCLVKGFYPSDIAVEWESNGQPENNYKTTPPVLDS |
| | | | DGSFFLYSKLTVDKSRWQQGNVFSCSVMHEALHNHYTQKSLSLSPGK |
| 1256. | CD70_33_CC | bispecific | QVQLVESGGGVVQPGRSLRLSCAASGFTFSYYGMHWVRQAPGKCLEW |
| | xCD3- | HLE | VAVIWYDASNKYYADAVKGRFTISRDNSKNTLYLQMNSLRAEDTAVY |
| | scFc_delGK | molecule | YCARDREMGSRGDFDYWGQGTLVTVSSGGGGSGGGGSGGGGSDIQMT |
| | | | QSPSSLSASVGDRVTITCRASQGINNYLAWFQQKPGKAPKSLIYAVS |
| | | | ILQSGVPSKFSGSGSGTDFTLTISNLQPEDFATYYCQQYNFYPFSFG |
| | | | CGTKVDIKSGGGGSEVQLVESGGGLVQPGGSLKLSCAASGFTFNKYA |
| | | | MNWVRQAPGKGLEWVARIRSKYNNYATYYADSVKDRFTISRDDSKNT |
| | | | AYLQMNNLKTEDTAVYYCVRHGNFGNSYISYWAYWGQGTLVTVSSGG |
| | | | GGSGGGGSGGGGSQTVVTQEPSLTVSPGGTVTLTCGSSTGAVTSGNY |
| | | | PNWVQQKPGQAPRGLIGGTKFLAPGTPARFSGSLLGGKAALTLSGVQ |
| | | | PEDEAEYYCVLWYSNRWVFGGGTKLTVLGGGGDKTHTCPPCPAPELL |
| | | | GGPSVFLFPPKPKDTLMISRTPEVTCVVVDVSHEDPEVKFNWYVDGV |
| | | | EVHNAKTKPCEEQYGSTYRCVSVLTVLHQDWLNGKEYKCKVSNKALP |
| | | | APIEKTISKAKGQPREPQVYTLPPSREEMTKNQVSLTCLVKGFYPSD |
| | | | IAVEWESNGQPENNYKTTPPVLDSDGSFFLYSKLTVDKSRWQQGNVF |
| | | | SCSVMHEALHNHYTQKSLSLSPGGGGSGGGGSGGGGSGGGGSGGGGS |
| | | | GGGGSDKTHTCPPCPAPELLGGPSVFLFPPKPKDTLMISRTPEVTCV |
| | | | VVDVSHEDPEVKFNWYVDGVEVHNAKTKPCEEQYGSTYRCVSVLTVL |
| | | | HQDWLNGKEYKCKVSNKALPAPIEKTISKAKGQPREPQVYTLPPSRE |
| | | | EMTKNQVSLTCLVKGFYPSDIAVEWESNGQPENNYKTTPPVLDSDGS |
| | | | FFLYSKLTVDKSRWQQGNVFSCSVMHEALHNHYTQKSLSLSPGK |
| 1257. | CD70_33xCD | bispecific | QVQLVESGGGVVQPGRSLRLSCAASGFTFSYYGMHWVRQAPGKGLEW |
| | 3-scFc_delGK | HLE | VAVIWYDASNKYYADAVKGRFTISRDNSKNTLYLQMNSLRAEDTAVY |
| | | molecule | YCARDREMGSRGDFDYWGQGTLVTVSSGGGGSGGGGSGGGGSDIQMT |
| | | | QSPSSLSASVGDRVTITCRASQGINNYLAWFQQKPGKAPKSLIYAVS |
| | | | ILQSGVPSKFSGSGSGTDFTLTISNLQPEDFATYYCQQYNFYPFSFG |
| | | | QGTKVDIKSGGGGSEVQLVESGGGLVQPGGSLKLSCAASGFTFNKYA |
| | | | MNWVRQAPGKGLEWVARIRSKYNNYATYYADSVKDRFTISRDDSKNT |
| | | | AYLQMNNLKTEDTAVYYCVRHGNFGNSYISYWAYWGQGTLVTVSSGG |
| | | | GGSGGGGSGGGGSQTVVTQEPSLTVSPGGTVTLTCGSSTGAVTSGNY |
| | | | PNWVQQKPGQAPRGLIGGTKFLAPGTPARFSGSLLGGKAALTLSGVQ |
| | | | PEDEAEYYCVLWYSNRWVFGGGTKLTVLGGGGDKTHTCPPCPAPELL |
| | | | GGPSVFLFPPKPKDTLMISRTPEVTCVVVDVSHEDPEVKFNWYVDGV |
| | | | EVHNAKTKPCEEQYGSTYRCVSVLTVLHQDWLNGKEYKCKVSNKALP |
| | | | APIEKTISKAKGQPREPQVYTLPPSREEMTKNQVSLTCLVKGFYPSD |
| | | | IAVEWESNGQPENNYKTTPPVLDSDGSFFLYSKLTVDKSRWQQGNVF |
| | | | SCSVMHEALHNHYTQKSLSLSPGGGGSGGGGSGGGGSGGGGSGGGGS |
| | | | GGGGSDKTHTCPPCPAPELLGGPSVFLFPPKPKDTLMISRTPEVTCV |
| | | | VVDVSHEDPEVKFNWYVDGVEVHNAKTKPCEEQYGSTYRCVSVLTVL |
| | | | HQDWLNGKEYKCKVSNKALPAPIEKTISKAKGQPREPQVYTLPPSRE |
| | | | EMTKNQVSLTCLVKGFYPSDIAVEWESNGQPENNYKTTPPVLDSDGS |
| | | | FFLYSKLTVDKSRWQQGNVFSCSVMHEALHNHYTQKSLSLSPGK |
| 1258. | CD70_34_CC | bispecific | QVQLQQWGAGLLKPSETLSLTCAVYGGSFSGFYWSWIRQPPGKCLEW |
| | xCD3- | HLE | IGEIYHSGHATNNPSLKSRVTISLDTSKNQFSLKLNSVTAADTAVYY |
| | scFc_delGK | molecule | CARGGNSGYIFDYWGQGTLVTVSSGGGGSGGGGSGGGGSDVQMTQSP |
| | | | SSLSASVGDRVTITCRTSQYIGRYLNWYQQKPGKAPKVLIYGASTLQ |
| | | | QGVPSRFSGSGSGTDFTLTITSLQPEDFASYYCQQTYSTPRTFGCGT |
| | | | KVEIKSGGGGSEVQLVESGGGLVQPGGSLKLSCAASGFTFNKYAMNW |
| | | | VRQAPGKGLEWVARIRSKYNNYATYYADSVKDRFTISRDDSKNTAYL |
| | | | QMNNLKTEDTAVYYCVRHGNFGNSYISYWAYWGQGTLVTVSSGGGGS |
| | | | GGGGSGGGGSQTVVTQEPSLTVSPGGTVTLTCGSSTGAVTSGNYPNW |
| | | | VQQKPGQAPRGLIGGTKFLAPGTPARFSGSLLGGKAALTLSGVQPED |
| | | | EAEYYCVLWYSNRWVFGGGTKLTVLGGGGDKTHTCPPCPAPELLGGP |
| | | | SVFLFPPKPKDTLMISRTPEVTCVVVDVSHEDPEVKFNWYVDGVEVH |
| | | | NAKTKPCEEQYGSTYRCVSVLTVLHQDWLNGKEYKCKVSNKALPAPI |
| | | | EKTISKAKGQPREPQVYTLPPSREEMTKNQVSLTCLVKGFYPSDIAV |
| | | | EWESNGQPENNYKTTPPVLDSDGSFFLYSKLTVDKSRWQQGNVFSCS |
| | | | VMHEALHNHYTQKSLSLSPGGGGSGGGGSGGGGSGGGGSGGGGSGGG |
| | | | GSDKTHTCPPCPAPELLGGPSVFLFPPKPKDTLMISRTPEVTCVVVD |
| | | | VSHEDPEVKFNWYVDGVEVHNAKTKPCEEQYGSTYRCVSVLTVLHQD |
| | | | WLNGKEYKCKVSNKALPAPIEKTISKAKGQPREPQVYTLPPSREEMT |
| | | | KNQVSLTCLVKGFYPSDIAVEWESNGQPENNYKTTPPVLDSDGSFFL |
| | | | YSKLTVDKSRWQQGNVFSCSVMHEALHNHYTQKSLSLSPGK |
| 1259. | CD70_34xCD | bispecific | QVQLQQWGAGLLKPSETLSLTCAVYGGSFSGFYWSWIRQPPGKGLEW |
| | 3-scFc_delGK | HLE | IGEIYHSGHATNNPSLKSRVTISLDTSKNQFSLKLNSVTAADTAVYY |
| | | molecule | CARGGNSGYIFDYWGQGTLVTVSSGGGGSGGGGSGGGGSDVQMTQSP |
| | | | SSLSASVGDRVTITCRTSQYIGRYLNWYQQKPGKAPKVLIYGASTLQ |
| | | | QGVPSRFSGSGSGTDFTLTITSLQPEDFASYYCQQTYSTPRTFGQGT |
| | | | KVEIKSGGGGSEVQLVESGGGLVQPGGSLKLSCAASGFTFNKYAMNW |
| | | | VRQAPGKGLEWVARIRSKYNNYATYYADSVKDRFTISRDDSKNTAYL |
| | | | QMNNLKTEDTAVYYCVRHGNFGNSYISYWAYWGQGTLVTVSSGGGGS |
| | | | GGGGSGGGGSQTVVTQEPSLTVSPGGTVTLTCGSSTGAVTSGNYPNW |
| | | | VQQKPGQAPRGLIGGTKFLAPGTPARFSGSLLGGKAALTLSGVQPED |
| | | | EAEYYCVLWYSNRWVFGGGTKLTVLGGGGDKTHTCPPCPAPELLGGP |
| | | | SVFLFPPKPKDTLMISRTPEVTCVVVDVSHEDPEVKFNWYVDGVEVH |
| | | | NAKTKPCEEQYGSTYRCVSVLTVLHQDWLNGKEYKCKVSNKALPAPI |
| | | | EKTISKAKGQPREPQVYTLPPSREEMTKNQVSLTCLVKGFYPSDIAV |
| | | | EWESNGQPENNYKTTPPVLDSDGSFFLYSKLTVDKSRWQQGNVFSCS |
| | | | VMHEALHNHYTQKSLSLSPGGGGSGGGGSGGGGSGGGGSGGGGSGGG |
| | | | GSDKTHTCPPCPAPELLGGPSVFLFPPKPKDTLMISRTPEVTCVVVD |
| | | | VSHEDPEVKFNWYVDGVEVHNAKTKPCEEQYGSTYRCVSVLTVLHQD |
| | | | WLNGKEYKCKVSNKALPAPIEKTISKAKGQPREPQVYTLPPSREEMT |
| | | | KNQVSLTCLVKGFYPSDIAVEWESNGQPENNYKTTPPVLDSDGSFFL |
| | | | YSKLTVDKSRWQQGNVFSCSVMHEALHNHYTQKSLSLSPGK |
| 1260. | CD70_35_CC | bispecific | QVQLVESGGGVVQPGRSLRLSCAASGFTFSTYGMHWVRQAPGKCLEW |
| | xCD3- | HLE | VAVIWYEGSNKYYGESVKGRFTISRDNSKNTLYLQMNSLRAEDTAVY |
| | scFc_delGK | molecule | YCARDNSHYYYGMDVWGQGTTVTVSSGGGGSGGGGSGGGGSQSVLTQ |
| | | | PPSVSGAPGQRVTISCTGSSSNIGAGYDVNWYQQFPGTAPKLLIYVN |
| | | | NNRPSGVPDRFSGSTSGTSASLAITGLQAEDEADYYCQSYDTSLSAS |
| | | | VFGCGTRLTVLSGGGGSEVQLVESGGGLVQPGGSLKLSCAASGFTFN |
| | | | KYAMNWVRQAPGKGLEWVARIRSKYNNYATYYADSVKDRFTISRDDS |
| | | | KNTAYLQMNNLKTEDTAVYYCVRHGNFGNSYISYWAYWGQGTLVTVS |
| | | | SGGGGSGGGGSGGGGSQTVVTQEPSLTVSPGGTVTLTCGSSTGAVTS |
| | | | GNYPNWVQQKPGQAPRGLIGGTKFLAPGTPARFSGSLLGGKAALTLS |
| | | | GVQPEDEAEYYCVLWYSNRWVFGGGTKLTVLGGGGDKTHTCPPCPAP |
| | | | ELLGGPSVFLFPPKPKDTLMISRTPEVTCVVVDVSHEDPEVKFNWYV |
| | | | DGVEVHNAKTKPCEEQYGSTYRCVSVLTVLHQDWLNGKEYKCKVSNK |
| | | | ALPAPIEKTISKAKGQPREPQVYTLPPSREEMTKNQVSLTCLVKGFY |
| | | | PSDIAVEWESNGQPENNYKTTPPVLDSDGSFFLYSKLTVDKSRWQQG |
| | | | NVFSCSVMHEALHNHYTQKSLSLSPGGGGSGGGGSGGGGSGGGGSGG |
| | | | GGSGGGGSDKTHTCPPCPAPELLGGPSVFLFPPKPKDTLMISRTPEV |
| | | | TCVVVDVSHEDPEVKFNWYVDGVEVHNAKTKPCEEQYGSTYRCVSVL |
| | | | TVLHQDWLNGKEYKCKVSNKALPAPIEKTISKAKGQPREPQVYTLPP |
| | | | SREEMTKNQVSLTCLVKGFYPSDIAVEWESNGQPENNYKTTPPVLDS |
| | | | DGSFFLYSKLTVDKSRWQQGNVFSCSVMHEALHNHYTQKSLSLSPGK |
| 1261. | CD70_35xCD | bispecific | QVQLVESGGGVVQPGRSLRLSCAASGFTFSTYGMHWVRQAPGKGLEW |
| | 3-scFc_delGK | HLE | VAVIWYEGSNKYYGESVKGRFTISRDNSKNTLYLQMNSLRAEDTAVY |
| | | molecule | YCARDNSHYYYGMDVWGQGTTVTVSSGGGGSGGGGSGGGGSQSVLTQ |
| | | | PPSVSGAPGQRVTISCTGSSSNIGAGYDVNWYQQFPGTAPKLLIYVN |
| | | | NNRPSGVPDRFSGSTSGTSASLAITGLQAEDEADYYCQSYDTSLSAS |
| | | | VFGGGTRLTVLSGGGGSEVQLVESGGGLVQPGGSLKLSCAASGFTFN |
| | | | KYAMNWVRQAPGKGLEWVARIRSKYNNYATYYADSVKDRFTISRDDS |
| | | | KNTAYLQMNNLKTEDTAVYYCVRHGNFGNSYISYWAYWGQGTLVTVS |
| | | | SGGGGSGGGGSGGGGSQTVVTQEPSLTVSPGGTVTLTCGSSTGAVTS |
| | | | GNYPNWVQQKPGQAPRGLIGGTKFLAPGTPARFSGSLLGGKAALTLS |
| | | | GVQPEDEAEYYCVLWYSNRWVFGGGTKLTVLGGGGDKTHTCPPCPAP |
| | | | ELLGGPSVFLFPPKPKDTLMISRTPEVTCVVVDVSHEDPEVKFNWYV |
| | | | DGVEVHNAKTKPCEEQYGSTYRCVSVLTVLHQDWLNGKEYKCKVSNK |
| | | | ALPAPIEKTISKAKGQPREPQVYTLPPSREEMTKNQVSLTCLVKGFY |
| | | | PSDIAVEWESNGQPENNYKTTPPVLDSDGSFFLYSKLTVDKSRWQQG |
| | | | NVFSCSVMHEALHNHYTQKSLSLSPGGGGSGGGGSGGGGSGGGGSGG |
| | | | GGSGGGGSDKTHTCPPCPAPELLGGPSVFLFPPKPKDTLMISRTPEV |
| | | | TCVVVDVSHEDPEVKFNWYVDGVEVHNAKTKPCEEQYGSTYRCVSVL |
| | | | TVLHQDWLNGKEYKCKVSNKALPAPIEKTISKAKGQPREPQVYTLPP |
| | | | SREEMTKNQVSLTCLVKGFYPSDIAVEWESNGQPENNYKTTPPVLDS |
| | | | DGSFFLYSKLTVDKSRWQQGNVFSCSVMHEALHNHYTQKSLSLSPGK |
| 1262. | CD70_36_CC | bispecific | QVQLVESGGGVVQPGRSLRLSCAASGFTFSTYGMHWVRQAPGKCLEW |
| | xCD3- | HLE | VAVIWYEGSNKYYGESVKGRFTISRDNSKNTLYLQMNSLRAEDTAVY |
| | scFc_delGK | molecule | YCARDNSHYYYGMDVWGQGTLVTVSSGGGGSGGGGSGGGGSQSVLTQ |
| | | | PPSVSGAPGQRVTISCTGSSSNIGAGYDVNWYQQLPGTAPKLLIYVN |
| | | | NNRPSGVPDRFSGSKSGTSASLAITGLQAEDEADYYCQSYETSLSAS |
| | | | VFGCGTRLTVLSGGGGSEVQLVESGGGLVQPGGSLKLSCAASGFTFN |
| | | | KYAMNWVRQAPGKGLEWVARIRSKYNNYATYYADSVKDRFTISRDDS |
| | | | KNTAYLQMNNLKTEDTAVYYCVRHGNFGNSYISYWAYWGQGTLVTVS |
| | | | SGGGGSGGGGSGGGGSQTVVTQEPSLTVSPGGTVTLTCGSSTGAVTS |
| | | | GNYPNWVQQKPGQAPRGLIGGTKFLAPGTPARFSGSLLGGKAALTLS |
| | | | GVQPEDEAEYYCVLWYSNRWVFGGGTKLTVLGGGGDKTHTCPPCPAP |
| | | | ELLGGPSVFLFPPKPKDTLMISRTPEVTCVVVDVSHEDPEVKFNWYV |
| | | | DGVEVHNAKTKPCEEQYGSTYRCVSVLTVLHQDWLNGKEYKCKVSNK |
| | | | ALPAPIEKTISKAKGQPREPQVYTLPPSREEMTKNQVSLTCLVKGFY |
| | | | PSDIAVEWESNGQPENNYKTTPPVLDSDGSFFLYSKLTVDKSRWQQG |
| | | | NVFSCSVMHEALHNHYTQKSLSLSPGGGGSGGGGSGGGGSGGGGSGG |
| | | | GGSGGGGSDKTHTCPPCPAPELLGGPSVFLFPPKPKDTLMISRTPEV |
| | | | TCVVVDVSHEDPEVKFNWYVDGVEVHNAKTKPCEEQYGSTYRCVSVL |
| | | | TVLHQDWLNGKEYKCKVSNKALPAPIEKTISKAKGQPREPQVYTLPP |
| | | | SREEMTKNQVSLTCLVKGFYPSDIAVEWESNGQPENNYKTTPPVLDS |
| | | | DGSFFLYSKLTVDKSRWQQGNVFSCSVMHEALHNHYTQKSLSLSPGK |
| 1263. | CD70_36xCD | bispecific | QVQLVESGGGVVQPGRSLRLSCAASGFTFSTYGMHWVRQAPGKGLEW |
| | 3-scFc_delGK | HLE | VAVIWYEGSNKYYGESVKGRFTISRDNSKNTLYLQMNSLRAEDTAVY |
| | | molecule | YCARDNSHYYYGMDVWGQGTLVTVSSGGGGSGGGGSGGGGSQSVLTQ |
| | | | PPSVSGAPGQRVTISCTGSSSNIGAGYDVNWYQQLPGTAPKLLIYVN |
| | | | NNRPSGVPDRFSGSKSGTSASLAITGLQAEDEADYYCQSYETSLSAS |
| | | | VFGGGTRLTVLSGGGGSEVQLVESGGGLVQPGGSLKLSCAASGFTFN |
| | | | KYAMNWVRQAPGKGLEWVARIRSKYNNYATYYADSVKDRFTISRDDS |
| | | | KNTAYLQMNNLKTEDTAVYYCVRHGNFGNSYISYWAYWGQGTLVTVS |
| | | | SGGGGSGGGGSGGGGSQTVVTQEPSLTVSPGGTVTLTCGSSTGAVTS |
| | | | GNYPNWVQQKPGQAPRGLIGGTKFLAPGTPARFSGSLLGGKAALTLS |
| | | | GVQPEDEAEYYCVLWYSNRWVFGGGTKLTVLGGGGDKTHTCPPCPAP |
| | | | ELLGGPSVFLFPPKPKDTLMISRTPEVTCVVVDVSHEDPEVKFNWYV |
| | | | DGVEVHNAKTKPCEEQYGSTYRCVSVLTVLHQDWLNGKEYKCKVSNK |
| | | | ALPAPIEKTISKAKGQPREPQVYTLPPSREEMTKNQVSLTCLVKGFY |
| | | | PSDIAVEWESNGQPENNYKTTPPVLDSDGSFFLYSKLTVDKSRWQQG |
| | | | NVFSCSVMHEALHNHYTQKSLSLSPGGGGSGGGGSGGGGSGGGGSGG |
| | | | GGSGGGGSDKTHTCPPCPAPELLGGPSVFLFPPKPKDTLMISRTPEV |
| | | | TCVVVDVSHEDPEVKFNWYVDGVEVHNAKTKPCEEQYGSTYRCVSVL |
| | | | TVLHQDWLNGKEYKCKVSNKALPAPIEKTISKAKGQPREPQVYTLPP |
| | | | SREEMTKNQVSLTCLVKGFYPSDIAVEWESNGQPENNYKTTPPVLDS |
| | | | DGSFFLYSKLTVDKSRWQQGNVFSCSVMHEALHNHYTQKSLSLSPGK |
| 1264. | CD70_37_CC | bispecific | QMQLQESGPGLVKPSETLSLTCTVSGGSIESGVYYWSWIRQPPGKCL |
| | xCD3- | HLE | EWIGYIYYSGSTSYNPSLKSRLTMSVDTSKNQFSLKLSSVTAADTAV |
| | scFc_delGK | molecule | YYCARSGYSYALFDYWGQGTLVTVSSGGGGSGGGGSGGGGSDIQMTQ |
| | | | SPSSLSASLGDRVTITCRASQSVDRYFNWYQQKPGKAPKVLIFAASS |
| | | | LQSGVPSRFSGSGSGTDFTLTISSLQPEDFATYYCQQSYSTPWTFGC |
| | | | GTKVEVKSGGGGSEVQLVESGGGLVQPGGSLKLSCAASGFTFNKYAM |
| | | | NWVRQAPGKGLEWVARIRSKYNNYATYYADSVKDRFTISRDDSKNTA |
| | | | YLQMNNLKTEDTAVYYCVRHGNFGNSYISYWAYWGQGTLVTVSSGGG |
| | | | GSGGGGSGGGGSQTVVTQEPSLTVSPGGTVTLTCGSSTGAVTSGNYP |
| | | | NWVQQKPGQAPRGLIGGTKFLAPGTPARFSGSLLGGKAALTLSGVQP |
| | | | EDEAEYYCVLWYSNRWVFGGGTKLTVLGGGGDKTHTCPPCPAPELLG |
| | | | GPSVFLFPPKPKDTLMISRTPEVTCVVVDVSHEDPEVKFNWYVDGVE |
| | | | VHNAKTKPCEEQYGSTYRCVSVLTVLHQDWLNGKEYKCKVSNKALPA |
| | | | PIEKTISKAKGQPREPQVYTLPPSREEMTKNQVSLTCLVKGFYPSDI |
| | | | AVEWESNGQPENNYKTTPPVLDSDGSFFLYSKLTVDKSRWQQGNVFS |
| | | | CSVMHEALHNHYTQKSLSLSPGGGGSGGGGSGGGGSGGGGSGGGGSG |
| | | | GGGSDKTHTCPPCPAPELLGGPSVFLFPPKPKDTLMISRTPEVTCVV |
| | | | VDVSHEDPEVKFNWYVDGVEVHNAKTKPCEEQYGSTYRCVSVLTVLH |
| | | | QDWLNGKEYKCKVSNKALPAPIEKTISKAKGQPREPQVYTLPPSREE |
| | | | MTKNQVSLTCLVKGFYPSDIAVEWESNGQPENNYKTTPPVLDSDGSF |
| | | | FLYSKLTVDKSRWQQGNVFSCSVMHEALHNHYTQKSLSLSPGK |
| 1265. | CD70_37xCD | bispecific | QMQLQESGPGLVKPSETLSLTCTVSGGSIESGVYYWSWIRQPPGKGL |
| | 3-scFc_delGK | HLE | EWIGYIYYSGSTSYNPSLKSRLTMSVDTSKNQFSLKLSSVTAADTAV |
| | | molecule | YYCARSGYSYALFDYWGQGTLVTVSSGGGGSGGGGSGGGGSDIQMTQ |
| | | | SPSSLSASLGDRVTITCRASQSVDRYFNWYQQKPGKAPKVLIFAASS |
| | | | LQSGVPSRFSGSGSGTDFTLTISSLQPEDFATYYCQQSYSTPWTFGQ |
| | | | GTKVEVKSGGGGSEVQLVESGGGLVQPGGSLKLSCAASGFTFNKYAM |
| | | | NWVRQAPGKGLEWVARIRSKYNNYATYYADSVKDRFTISRDDSKNTA |
| | | | YLQMNNLKTEDTAVYYCVRHGNFGNSYISYWAYWGQGTLVTVSSGGG |
| | | | GSGGGGSGGGGSQTVVTQEPSLTVSPGGTVTLTCGSSTGAVTSGNYP |
| | | | NWVQQKPGQAPRGLIGGTKFLAPGTPARFSGSLLGGKAALTLSGVQP |
| | | | EDEAEYYCVLWYSNRWVFGGGTKLTVLGGGGDKTHTCPPCPAPELLG |
| | | | GPSVFLFPPKPKDTLMISRTPEVTCVVVDVSHEDPEVKFNWYVDGVE |
| | | | VHNAKTKPCEEQYGSTYRCVSVLTVLHQDWLNGKEYKCKVSNKALPA |
| | | | PIEKTISKAKGQPREPQVYTLPPSREEMTKNQVSLTCLVKGFYPSDI |
| | | | AVEWESNGQPENNYKTTPPVLDSDGSFFLYSKLTVDKSRWQQGNVFS |
| | | | CSVMHEALHNHYTQKSLSLSPGGGGSGGGGSGGGGSGGGGSGGGGSG |
| | | | GGGSDKTHTCPPCPAPELLGGPSVFLFPPKPKDTLMISRTPEVTCVV |
| | | | VDVSHEDPEVKFNWYVDGVEVHNAKTKPCEEQYGSTYRCVSVLTVLH |
| | | | QDWLNGKEYKCKVSNKALPAPIEKTISKAKGQPREPQVYTLPPSREE |
| | | | MTKNQVSLTCLVKGFYPSDIAVEWESNGQPENNYKTTPPVLDSDGSF |
| | | | FLYSKLTVDKSRWQQGNVFSCSVMHEALHNHYTQKSLSLSPGK |
| 1266. | CD70_38_CC | bispecific | QVQLQESGPGLVKPSQTLSLTCTVSGDSIISGGYYWSWIRQPPGKCL |
| | xCD3- | HLE | EWIGYIFYSGSTDYNPSLKSRVTISVDTSKNQFSLKLSSVTAADTAV |
| | scFc_delGK | molecule | YYCARSGYSYALFDAWGQGTLVTVSSGGGGSGGGGSGGGGSDIQMTQ |
| | | | SPSSLSASVGDRVTISCRASQFIGRYFNWYQQKPGKAPKVLIYAESS |
| | | | LQSGVPSRFSGSGSGTEFTLTISSLQPEDFATYYCQQSYSTPWTFGC |
| | | | GTKVEIKSGGGGSEVQLVESGGGLVQPGGSLKLSCAASGFTFNKYAM |
| | | | NWVRQAPGKGLEWVARIRSKYNNYATYYADSVKDRFTISRDDSKNTA |
| | | | YLQMNNLKTEDTAVYYCVRHGNFGNSYISYWAYWGQGTLVTVSSGGG |
| | | | GSGGGGSGGGGSQTVVTQEPSLTVSPGGTVTLTCGSSTGAVTSGNYP |
| | | | NWVQQKPGQAPRGLIGGTKFLAPGTPARFSGSLLGGKAALTLSGVQP |
| | | | EDEAEYYCVLWYSNRWVFGGGTKLTVLGGGGDKTHTCPPCPAPELLG |
| | | | GPSVFLFPPKPKDTLMISRTPEVTCVVVDVSHEDPEVKFNWYVDGVE |
| | | | VHNAKTKPCEEQYGSTYRCVSVLTVLHQDWLNGKEYKCKVSNKALPA |
| | | | PIEKTISKAKGQPREPQVYTLPPSREEMTKNQVSLTCLVKGFYPSDI |
| | | | AVEWESNGQPENNYKTTPPVLDSDGSFFLYSKLTVDKSRWQQGNVFS |
| | | | CSVMHEALHNHYTQKSLSLSPGGGGSGGGGSGGGGSGGGGSGGGGSG |
| | | | GGGSDKTHTCPPCPAPELLGGPSVFLFPPKPKDTLMISRTPEVTCVV |
| | | | VDVSHEDPEVKFNWYVDGVEVHNAKTKPCEEQYGSTYRCVSVLTVLH |
| | | | QDWLNGKEYKCKVSNKALPAPIEKTISKAKGQPREPQVYTLPPSREE |
| | | | MTKNQVSLTCLVKGFYPSDIAVEWESNGQPENNYKTTPPVLDSDGSF |
| | | | FLYSKLTVDKSRWQQGNVFSCSVMHEALHNHYTQKSLSLSPGK |
| 1267. | CD70_38xCD | bispecific | QVQLQESGPGLVKPSQTLSLTCTVSGDSIISGGYYWSWIRQPPGKGL |
| | 3-scFc_delGK | HLE | EWIGYIFYSGSTDYNPSLKSRVTISVDTSKNQFSLKLSSVTAADTAV |
| | | molecule | YYCARSGYSYALFDAWGQGTLVTVSSGGGGSGGGGSGGGGSDIQMTQ |
| | | | SPSSLSASVGDRVTISCRASQFIGRYFNWYQQKPGKAPKVLIYAESS |
| | | | LQSGVPSRFSGSGSGTEFTLTISSLQPEDFATYYCQQSYSTPWTFGQ |
| | | | GTKVEIKSGGGGSEVQLVESGGGLVQPGGSLKLSCAASGFTFNKYAM |
| | | | NWVRQAPGKGLEWVARIRSKYNNYATYYADSVKDRFTISRDDSKNTA |
| | | | YLQMNNLKTEDTAVYYCVRHGNFGNSYISYWAYWGQGTLVTVSSGGG |
| | | | GSGGGGSGGGGSQTVVTQEPSLTVSPGGTVTLTCGSSTGAVTSGNYP |
| | | | NWVQQKPGQAPRGLIGGTKFLAPGTPARFSGSLLGGKAALTLSGVQP |
| | | | EDEAEYYCVLWYSNRWVFGGGTKLTVLGGGGDKTHTCPPCPAPELLG |
| | | | GPSVFLFPPKPKDTLMISRTPEVTCVVVDVSHEDPEVKFNWYVDGVE |
| | | | VHNAKTKPCEEQYGSTYRCVSVLTVLHQDWLNGKEYKCKVSNKALPA |
| | | | PIEKTISKAKGQPREPQVYTLPPSREEMTKNQVSLTCLVKGFYPSDI |
| | | | AVEWESNGQPENNYKTTPPVLDSDGSFFLYSKLTVDKSRWQQGNVFS |
| | | | CSVMHEALHNHYTQKSLSLSPGGGGSGGGGSGGGGSGGGGSGGGGSG |
| | | | GGGSDKTHTCPPCPAPELLGGPSVFLFPPKPKDTLMISRTPEVTCVV |
| | | | VDVSHEDPEVKFNWYVDGVEVHNAKTKPCEEQYGSTYRCVSVLTVLH |
| | | | QDWLNGKEYKCKVSNKALPAPIEKTISKAKGQPREPQVYTLPPSREE |
| | | | MTKNQVSLTCLVKGFYPSDIAVEWESNGQPENNYKTTPPVLDSDGSF |
| | | | FLYSKLTVDKSRWQQGNVFSCSVMHEALHNHYTQKSLSLSPGK |
| 1268. | CD20-HLE | scFc | QVQLVQSGAEVKKPGSSVKVSCKASGYAFSYSWINWVRQAPGQGLEW |
| | | | MGRIFPGDGDTDYNGKFKGRVTITADKSTSTAYMELSSLRSEDTAVY |
| | | | YCARNVFDGYWLVYWGQGTLVTVSSGGGGSGGGGSGGGGSDIVMTQT |
| | | | PLSLPVTPGEPASISCRSSKSLLHSNGITYLYWYLQKPGQSPQLLIY |
| | | | QMSNLVSGVPDRFSGSGSGTDFTLKISRVEAEDVGVYYCAQNLELPY |
| | | | TFGGGTKVEIKSGGGGSEVQLVESGGGLVQPGGSLKLSCAASGFTFN |
| | | | KYAMNWVRQAPGKGLEWVARIRSKYNNYATYYADSVKDRFTISRDDS |
| | | | KNTAYLQMNNLKTEDTAVYYCVRHGNFGNSYISYWAYWGQGTLVTVS |
| | | | SGGGGSGGGGSGGGGSQTVVTQEPSLTVSPGGTVTLTCGSSTGAVTS |
| | | | GNYPNWVQQKPGQAPRGLIGGTKFLAPGTPARFSGSLLGGKAALTLS |
| | | | GVQPEDEAEYYCVLWYSNRWVFGGGTKLTVL |
| 1269. | CD19_9-87 | VH CDR1 | NYGMH |
| | CC xI2C0- | | |
| | scFc | | |
| 1270. | CD19_9-87 | VH CDR2 | AIGWEGSNKYYAEPVKG |
| | CC xI2C0- | | |
| | scFc | | |
| 1271. | CD19_9-87 | VH CDR3 | DRGTIFGYYGMDV |
| | CC xI2C0- | | |
| | scFc | | |
| 1272. | CD19_9-87 | VL CDR1 | RSSQSLLHSNRFNYLD |
| | CC xI2C0- | | |
| | scFc | | |
| 1273. | CD19_9-87 | VL CDR2 | LGSNRAS |
| | CC xI2C0- | | |
| | scFc | | |
| 1274. | CD19_9-87 | VL CDR3 | MQALQTPLT |
| | CC xI2C0- | | |
| | scFc | | |
| 1275. | CD19_9-87 | VH | QVQLVESGGGVVQPGRSLRLSCEASGFIVSNYGMHWVRQAPGKCLE |
| | CC xI2C0- | | WVAAIGWEGSNKYYAEPVKGRFTISRDKSKNTLSLQMSSLRAEDTAL |
| | scFc | | YYCARDRGTIFGYYGMDVWGQGTTVTVSS |
| 1276. | CD19_9-87 | VL | DIVMTQSPLSLPVTPGEPASISCRSSQSLLHSNRFNYLDWYLQKPGQS |
| | CC xI2C0- | | PQLLIYLGSNRASGVPDRFSGSGSGTDFTLKISRVEAEDVGVYYCMQA |
| | scFc | | LQTPLTFACGTKVEIK |
| 1277. | CD19_9-87 | scFv | DIVMTQSPLSLPVTPGEPASISCRSSQSLLHSNRFNYLDWYLQKPGQS |
| | CC xI2C0- | | PQLLIYLGSNRASGVPDRFSGSGSGTDFTLKISRVEAEDVGVYYCMQA |
| | scFc | | LQTPLTFACGTKVEIKGGGGSGGGGSGGGGSQVQLVESGGGVVQPG |
| | | | RSLRLSCEASGFIVSNYGMHWVRQAPGKCLEWVAAIGWEGSNKYYA |
| | | | EPVKGRFTISRDKSKNTLSLQMSSLRAEDTALYYCARDRGTIFGYYGM |
| | | | DVWGQGTTVTVSS |
| 1278. | CD19 9-87 | bispecific | DIVMTQSPLSLPVTPGEPASISCRSSQSLLHSNRFNYLDWYLQKPGQS |
| | CC xl2C0- | molecule | PQLLIYLGSNRASGVPDRFSGSGSGTDFTLKISRVEAEDVGVYYCMQA |
| | scFc | | LQTPLTFACGTKVEIKGGGGSGGGGSGGGGSQVQLVESGGGVVQPG |
| | | | RSLRLSCEASGFIVSNYGMHWVRQAPGKCLEWVAAIGWEGSNKYYA |
| | | | EPVKGRFTISRDKSKNTLSLQMSSLRAEDTALYYCARDRGTIFGYYGM |
| | | | DVWGQGTTVTVSSGGGGSEVQLVESGGGLVQPGGSLKLSCAASGFT |
| | | | FNKYAMNWVRQAPGKGLEWVARIRSKYNNYATYYADSVKDRFTISR |
| | | | DDSKNTAYLQMNNLKTEDTAVYYCVRHGNFGNSYISYWAYWGQGT |
| | | | LVTVSSGGGGSGGGGSGGGGSQTVVTQEPSLTVSPGGTVTLTCGSST |
| | | | GAVTSGNYPNWVQQKPGQAPRGLIGGTKFLAPGTPARFSGSLLGGK |
| | | | AALTLSGVQPEDEAEYYCVLWYSNRWVFGGGTKLTVL |
| 1279. | CD19 9-87 | bispecific | DIVMTQSPLSLPVTPGEPASISCRSSQSLLHSNRFNYLDWYLQKPGQS |
| | CC xl2C0- | HLE | PQLLIYLGSNRASGVPDRFSGSGSGTDFTLKISRVEAEDVGVYYCMQA |
| | scFc | molecule | LQTPLTFACGTKVEIKGGGGSGGGGSGGGGSQVQLVESGGGVVQPG |
| | | | RSLRLSCEASGFIVSNYGMHWVRQAPGKCLEWVAAIGWEGSNKYYA |
| | | | EPVKGRFTISRDKSKNTLSLQMSSLRAEDTALYYCARDRGTIFGYYGM |
| | | | DVWGQGTTVTVSSGGGGSEVQLVESGGGLVQPGGSLKLSCAASGFT |
| | | | FNKYAMNWVRQAPGKGLEWVARIRSKYNNYATYYADSVKDRFTISR |
| | | | DDSKNTAYLQMNNLKTEDTAVYYCVRHGNFGNSYISYWAYWGQGT |
| | | | LVTVSSGGGGSGGGGSGGGGSQTVVTQEPSLTVSPGGTVTLTCGSST |
| | | | GAVTSGNYPNWVQQKPGQAPRGLIGGTKFLAPGTPARFSGSLLGGK |
| | | | AALTLSGVQPEDEAEYYCVLWYSNRWVFGGGTKLTVLGGGGDKTHT |
| | | | CPPCPAPELLGGPSVFLFPPKPKDTLMISRTPEVTCVVVDVSHEDPEVK |
| | | | FNWYVDGVEVHNAKTKPCEEQYGSTYRCVSVLTVLHQDWLNGKEYK |
| | | | CKVSNKALPAPIEKTISKAKGQPREPQVYTLPPSREEMTKNQVSLTCLV |
| | | | KGFYPSDIAVEWESNGQPENNYKTTPPVLDSDGSFFLYSKLTVDKSR |
| | | | WQQGNVFSCSVMHEALHNHYTQKSLSLSPGKGGGGSGGGGSGGG |
| | | | GSGGGGSGGGGSGGGGSDKTHTCPPCPAPELLGGPSVFLFPPKPKDT |
| | | | LMISRTPEVTCVVVDVSHEDPEVKFNWYVDGVEVHNAKTKPCEEQY |
| | | | GSTYRCVSVLTVLHQDWLNGKEYKCKVSNKALPAPIEKTISKAKGQPR |
| | | | EPQVYTLPPSREEMTKNQVSLTCLVKGFYPSDIAVEWESNGQPENNY |
| | | | KTTPPVLDSDGSFFLYSKLTVDKSRWQQGNVFSCSVMHEALHNHYT |
| | | | QKSLSLSPGK |
| 1280. | CD19 9-87 | bispecific | DIVMTQSPLSLPVTPGEPASISCRSSQSLLHSNRFNYLDWYLQKPGQS |
| | CC xl2C0- | HLE | PQLLIYLGSNRASGVPDRFSGSGSGTDFTLKISRVEAEDVGVYYCMQA |
| | scFc_delGK | molecule | LQTPLTFACGTKVEIKGGGGSGGGGSGGGGSQVQLVESGGGVVQPG |
| | | | RSLRLSCEASGFIVSNYGMHWVRQAPGKCLEWVAAIGWEGSNKYYA |
| | | | EPVKGRFTISRDKSKNTLSLQMSSLRAEDTALYYCARDRGTIFGYYGM |
| | | | DVWGQGTTVTVSSGGGGSEVQLVESGGGLVQPGGSLKLSCAASGFT |
| | | | FNKYAMNWVRQAPGKGLEWVARIRSKYNNYATYYADSVKDRFTISR |
| | | | DDSKNTAYLQMNNLKTEDTAVYYCVRHGNFGNSYISYWAYWGQGT |
| | | | LVTVSSGGGGSGGGGSGGGGSQTVVTQEPSLTVSPGGTVTLTCGSST |
| | | | GAVTSGNYPNWVQQKPGQAPRGLIGGTKFLAPGTPARFSGSLLGGK |
| | | | AALTLSGVQPEDEAEYYCVLWYSNRWVFGGGTKLTVLGGGGDKTHT |
| | | | CPPCPAPELLGGPSVFLFPPKPKDTLMISRTPEVTCVVVDVSHEDPEVK |
| | | | FNWYVDGVEVHNAKTKPCEEQYGSTYRCVSVLTVLHQDWLNGKEYK |
| | | | CKVSNKALPAPIEKTISKAKGQPREPQVYTLPPSREEMTKNQVSLTCLV |
| | | | KGFYPSDIAVEWESNGQPENNYKTTPPVLDSDGSFFLYSKLTVDKSR |
| | | | WQQGNVFSCSVMHEALHNHYTQKSLSLSPGGGGSGGGGSGGGGS |
| | | | GGGGSGGGGSGGGGSDKTHTCPPCPAPELLGGPSVFLFPPKPKDTL |
| | | | MISRTPEVTCVVVDVSHEDPEVKFNWYVDGVEVHNAKTKPCEEQYG |
| | | | STYRCVSVLTVLHQDWLNGKEYKCKVSNKALPAPIEKTISKAKGQPRE |
| | | | PQVYTLPPSREEMTKNQVSLTCLVKGFYPSDIAVEWESNGQPENNYK |
| | | | TTPPVLDSDGSFFLYSKLTVDKSRWQQGNVFSCSVMHEALHNHYTQ |
| | | | KSLSLSPGK |
| 1281. | CD19 8-C2 | VH CDR1 | SYGIH |
| | CC xI2C0- | | |
| | sc Fc | | |
| 1282. | CD19 8-C2 | VH CDR2 | LTSYEGGNKYYAESVKG |
| | CC xI2C0- | | |
| | sc Fc | | |
| 1283. | CD19 8-C2 | VH CDR3 | DRGTIFGDYGMDV |
| | CC xI2C0- | | |
| | sc Fc | | |
| 1284. | CD19 8-C2 | VL CDR1 | RSSQSLLHKNAFNYLD |
| | CC xI2C0- | | |
| | sc Fc | | |
| 1285. | CD19 8-C2 | VL CDR2 | LGSNRAS |
| | CC xI2C0- | | |
| | sc Fc | | |
| 1286. | CD19 8-C2 | VL CDR3 | MQALQTPFT |
| | CC xI2C0- | | |
| | sc Fc | | |
| 1287. | CD19 8-C2 | VH | QVQLVESGGGVVQPGRSLRLSCAASGFTFSSYGIHWVRQAPGKCLE |
| | CC xI2C0- | | WVALTSYEGGNKYYAESVKGRFTISRDNSKNTLYLQMNSLRAEDTAV |
| | scFc | | YYCAKDRGTIFGDYGMDVWGQGTTVTVSS |
| 1288. | CD19 8-C2 | VL | DIVMTQSPLSLPVTPGEPASISCRSSQSLLHKNAFNYLDWYLQKPGQS |
| | CC xI2C0- | | PQLLIYLGSNRASGVPDRFSGSGSGTDFTLKISRVEAEDVGVYYCMQA |
| | scFc | | LQTPFTFGCGTKVEIK |
| 1289. | CD19 8-C2 | scFv | DIVMTQSPLSLPVTPGEPASISCRSSQSLLHKNAFNYLDWYLQKPGQS |
| | CC xI2C0- | | PQLLIYLGSNRASGVPDRFSGSGSGTDFTLKISRVEAEDVGVYYCMQA |
| | scFc | | LQTPFTFGCGTKVEIKGGGGSGGGGSGGGGSQVQLVESGGGVVQP |
| | | | GRSLRLSCAASGFTFSSYGIHWVRQAPGKCLEWVALTSYEGGNKYYA |
| | | | ESVKGRFTISRDNSKNTLYLQMNSLRAEDTAVYYCAKDRGTIFGDYG |
| | | | MDVWGQGTTVTVSS |
| 1290. | CD19 8-C2 | bispecific | DIVMTQSPLSLPVTPGEPASISCRSSQSLLHKNAFNYLDWYLQKPGQS |
| | CC xI2C0- | molecule | PQLLIYLGSNRASGVPDRFSGSGSGTDFTLKISRVEAEDVGVYYCMQA |
| | scFc | | LQTPFTFGCGTKVEIKGGGGSGGGGSGGGGSQVQLVESGGGVVQP |
| | | | GRSLRLSCAASGFTFSSYGIHWVRQAPGKCLEWVALTSYEGGNKYYA |
| | | | ESVKGRFTISRDNSKNTLYLQMNSLRAEDTAVYYCAKDRGTIFGDYG |
| | | | MDVWGQGTTVTVSSGGGGSEVQLVESGGGLVQPGGSLKLSCAASG |
| | | | FTFNKYAMNWVRQAPGKGLEWVARIRSKYNNYATYYADSVKDRFTI |
| | | | SRDDSKNTAYLQMNNLKTEDTAVYYCVRHGNFGNSYISYWAYWGQ |
| | | | GTLVTVSSGGGGSGGGGSGGGGSQTVVTQEPSLTVSPGGTVTLTCGS |
| | | | STGAVTSGNYPNWVQQKPGQAPRGLIGGTKFLAPGTPARFSGSLLG |
| | | | GKAALTLSGVQPEDEAEYYCVLWYSNRWVFGGGTKLTVL |
| 1291. | CD19 8-C2 | bispecific | DIVMTQSPLSLPVTPGEPASISCRSSQSLLHKNAFNYLDWYLQKPGQS |
| | CC xI2C0- | HLE | PQLLIYLGSNRASGVPDRFSGSGSGTDFTLKISRVEAEDVGVYYCMQA |
| | scFc | molecule | LQTPFTFGCGTKVEIKGGGGSGGGGSGGGGSQVQLVESGGGVVQP |
| | | | GRSLRLSCAASGFTFSSYGIHWVRQAPGKCLEWVALTSYEGGNKYYA |
| | | | ESVKGRFTISRDNSKNTLYLQMNSLRAEDTAVYYCAKDRGTIFGDYG |
| | | | MDVWGQGTTVTVSSGGGGSEVQLVESGGGLVQPGGSLKLSCAASG |
| | | | FTFNKYAMNWVRQAPGKGLEWVARIRSKYNNYATYYADSVKDRFTI |
| | | | SRDDSKNTAYLQMNNLKTEDTAVYYCVRHGNFGNSYISYWAYWGQ |
| | | | GTLVTVSSGGGGSGGGGSGGGGSQTVVTQEPSLTVSPGGTVTLTCGS |
| | | | STGAVTSGNYPNWVQQKPGQAPRGLIGGTKFLAPGTPARFSGSLLG |
| | | | GKAALTLSGVQPEDEAEYYCVLWYSNRWVFGGGTKLTVLGGGGDKT |
| | | | HTCPPCPAPELLGGPSVFLFPPKPKDTLMISRTPEVTCVVVDVSHEDPE |
| | | | VKFNWYVDGVEVHNAKTKPCEEQYGSTYRCVSVLTVLHQDWLNGKE |
| | | | YKCKVSNKALPAPIEKTISKAKGQPREPQVYTLPPSREEMTKNQVSLTC |
| | | | LVKGFYPSDIAVEWESNGQPENNYKTTPPVLDSDGSFFLYSKLTVDKS |
| | | | RWQQGNVFSCSVMHEALHNHYTQKSLSLSPGKGGGGSGGGGSGG |
| | | | GGSGGGGSGGGGSGGGGSDKTHTCPPCPAPELLGGPSVFLFPPKPK |
| | | | DTLMISRTPEVTCVVVDVSHEDPEVKFNWYVDGVEVHNAKTKPCEE |
| | | | QYGSTYRCVSVLTVLHQDWLNGKEYKCKVSNKALPAPIEKTISKAKGQ |
| | | | PREPQVYTLPPSREEMTKNQVSLTCLVKGFYPSDIAVEWESNGQPEN |
| | | | NYKTTPPVLDSDGSFFLYSKLTVDKSRWQQGNVFSCSVMHEALHNH |
| | | | YTQKSLSLSPGK |
| 1292. | CD19 8-C2 | bispecific | DIVMTQSPLSLPVTPGEPASISCRSSQSLLHKNAFNYLDWYLQKPGQS |
| | CC xI2C0- | HLE | PQLLIYLGSNRASGVPDRFSGSGSGTDFTLKISRVEAEDVGVYYCMQA |
| | scFc_delGK | molecule | LQTPFTFGCGTKVEIKGGGGSGGGGSGGGGSQVQLVESGGGVVQP |
| | | | GRSLRLSCAASGFTFSSYGIHWVRQAPGKCLEWVALTSYEGGNKYYA |
| | | | ESVKGRFTISRDNSKNTLYLQMNSLRAEDTAVYYCAKDRGTIFGDYG |
| | | | MDVWGQGTTVTVSSGGGGSEVQLVESGGGLVQPGGSLKLSCAASG |
| | | | FTFNKYAMNWVRQAPGKGLEWVARIRSKYNNYATYYADSVKDRFTI |
| | | | SRDDSKNTAYLQMNNLKTEDTAVYYCVRHGNFGNSYISYWAYWGQ |
| | | | GTLVTVSSGGGGSGGGGSGGGGSQTVVTQEPSLTVSPGGTVTLTCGS |
| | | | STGAVTSGNYPNWVQQKPGQAPRGLIGGTKFLAPGTPARFSGSLLG |
| | | | GKAALTLSGVQPEDEAEYYCVLWYSNRWVFGGGTKLTVLGGGGDKT |
| | | | HTCPPCPAPELLGGPSVFLFPPKPKDTLMISRTPEVTCVVVDVSHEDPE |
| | | | VKFNWYVDGVEVHNAKTKPCEEQYGSTYRCVSVLTVLHQDWLNGKE |
| | | | YKCKVSNKALPAPIEKTISKAKGQPREPQVYTLPPSREEMTKNQVSLTC |
| | | | LVKGFYPSDIAVEWESNGQPENNYKTTPPVLDSDGSFFLYSKLTVDKS |
| | | | RWQQGNVFSCSVMHEALHNHYTQKSLSLSPGGGGSGGGGSGGGG |
| | | | SGGGGSGGGGSGGGGSDKTHTCPPCPAPELLGGPSVFLFPPKPKDTL |
| | | | MISRTPEVTCVVVDVSHEDPEVKFNWYVDGVEVHNAKTKPCEEQYG |
| | | | STYRCVSVLTVLHQDWLNGKEYKCKVSNKALPAPIEKTISKAKGQPRE |
| | | | PQVYTLPPSREEMTKNQVSLTCLVKGFYPSDIAVEWESNGQPENNYK |
| | | | TTPPVLDSDGSFFLYSKLTVDKSRWQQGNVFSCSVMHEALHNHYTQ |
| | | | KSLSLSPGK |
| 1293. | CD19 8-C8 | VH CDR1 | SYGIH |
| | CC xI2C0-scFc | | |
| 1294. | CD19 8-C8 | VH CDR2 | LTSYEGGNKYYAESVKG |
| | CC xI2C0-scFc | | |
| 1295. | CD19 8-C8 | VH CDR3 | DRGTIFGDYGMDV |
| | CC xI2C0-scFc | | |
| 1296. | CD19 8-C8 | VL CDR1 | RSSQSLLHQNRFNYLD |
| | CC xI2C0-scFc | | |
| 1297. | CD19 8-C8 | VL CDR2 | LGSNRAS |
| | CC xI2C0-scFc | | |
| 1298. | CD19 8-C8 | VL CDR3 | MQALQTPFT |
| | CC xI2C0-scFc | | |
| 1299. | CD19 8-C8 | VH | QVQLVESGGGVVQPGRSLRLSCAASGFTFSSYGIHWVRQAPGKCLE |
| | CC xI2C0- | | WVALTSYEGGNKYYAESVKGRFTISRDNSKNTLYLQMNSLRAEDTAV |
| | scFc | | YYCAKDRGTIFGDYGMDVWGQGTTVTVSS |
| 1300. | CD19 8-C8 | VL | DIVMTQSPLSLPVTPGEPASISCRSSQSLLHQNRFNYLDWYLQKPGQS |
| | CC xI2C0- | | PQLLIYLGSNRASGVPDRFSGSGSGTDFTLKISRVEAEDVGVYYCMQA |
| | scFc | | LQTPFTFGCGTKVEIK |
| 1301. | CD19 8-C8 | scFv | DIVMTQSPLSLPVTPGEPASISCRSSQSLLHQNRFNYLDWYLQKPGQS |
| | CC xI2C0- | | PQLLIYLGSNRASGVPDRFSGSGSGTDFTLKISRVEAEDVGVYYCMQA |
| | scFc | | LQTPFTFGCGTKVEIKGGGGSGGGGSGGGGSQVQLVESGGGVVQP |
| | | | GRSLRLSCAASGFTFSSYGIHWVRQAPGKCLEWVALTSYEGGNKYYA |
| | | | ESVKGRFTISRDNSKNTLYLQMNSLRAEDTAVYYCAKDRGTIFGDYG |
| | | | MDVWGQGTTVTVSS |
| 1302. | CD19 8-C8 | bispecific | DIVMTQSPLSLPVTPGEPASISCRSSQSLLHQNRFNYLDWYLQKPGQS |
| | CC xI2C0- | molecule | PQLLIYLGSNRASGVPDRFSGSGSGTDFTLKISRVEAEDVGVYYCMQA |
| | scFc | | LQTPFTFGCGTKVEIKGGGGSGGGGSGGGGSQVQLVESGGGVVQP |
| | | | GRSLRLSCAASGFTFSSYGIHWVRQAPGKCLEWVALTSYEGGNKYYA |
| | | | ESVKGRFTISRDNSKNTLYLQMNSLRAEDTAVYYCAKDRGTIFGDYG |
| | | | MDVWGQGTTVTVSSGGGGSEVQLVESGGGLVQPGGSLKLSCAASG |
| | | | FTFNKYAMNWVRQAPGKGLEWVARIRSKYNNYATYYADSVKDRFTI |
| | | | SRDDSKNTAYLQMNNLKTEDTAVYYCVRHGNFGNSYISYWAYWGQ |
| | | | GTLVTVSSGGGGSGGGGSGGGGSQTVVTQEPSLTVSPGGTVTLTCGS |
| | | | STGAVTSGNYPNWVQQKPGQAPRGLIGGTKFLAPGTPARFSGSLLG |
| | | | GKAALTLSGVQPEDEAEYYCVLWYSNRWVFGGGTKLTVL |
| 1303. | CD19 8-C8 | bispecific | DIVMTQSPLSLPVTPGEPASISCRSSQSLLHQNRFNYLDWYLQKPGQS |
| | CC xI2C0- | HLE | PQLLIYLGSNRASGVPDRFSGSGSGTDFTLKISRVEAEDVGVYYCMQA |
| | scFc | molecule | LQTPFTFGCGTKVEIKGGGGSGGGGSGGGGSQVQLVESGGGVVQP |
| | | | GRSLRLSCAASGFTFSSYGIHWVRQAPGKCLEWVALTSYEGGNKYYA |
| | | | ESVKGRFTISRDNSKNTLYLQMNSLRAEDTAVYYCAKDRGTIFGDYG |
| | | | MDVWGQGTTVTVSSGGGGSEVQLVESGGGLVQPGGSLKLSCAASG |
| | | | FTFNKYAMNWVRQAPGKGLEWVARIRSKYNNYATYYADSVKDRFTI |
| | | | SRDDSKNTAYLQMNNLKTEDTAVYYCVRHGNFGNSYISYWAYWGQ |
| | | | GTLVTVSSGGGGSGGGGSGGGGSQTVVTQEPSLTVSPGGTVTLTCGS |
| | | | STGAVTSGNYPNWVQQKPGQAPRGLIGGTKFLAPGTPARFSGSLLG |
| | | | GKAALTLSGVQPEDEAEYYCVLWYSNRWVFGGGTKLTVLGGGGDKT |
| | | | HTCPPCPAPELLGGPSVFLFPPKPKDTLMISRTPEVTCVVVDVSHEDPE |
| | | | VKFNWYVDGVEVHNAKTKPCEEQYGSTYRCVSVLTVLHQDWLNGKE |
| | | | YKCKVSNKALPAPIEKTISKAKGQPREPQVYTLPPSREEMTKNQVSLTC |
| | | | LVKGFYPSDIAVEWESNGQPENNYKTTPPVLDSDGSFFLYSKLTVDKS |
| | | | RWQQGNVFSCSVMHEALHNHYTQKSLSLSPGKGGGGSGGGGSGG |
| | | | GGSGGGGSGGGGSGGGGSDKTHTCPPCPAPELLGGPSVFLFPPKPK |
| | | | DTLMISRTPEVTCVVVDVSHEDPEVKFNWYVDGVEVHNAKTKPCEE |
| | | | QYGSTYRCVSVLTVLHQDWLNGKEYKCKVSNKALPAPIEKTISKAKGQ |
| | | | PREPQVYTLPPSREEMTKNQVSLTCLVKGFYPSDIAVEWESNGQPEN |
| | | | NYKTTPPVLDSDGSFFLYSKLTVDKSRWQQGNVFSCSVMHEALHNH |
| | | | YTQKSLSLSPGK |
| 1304. | CD19 8-C8 | bispecific | DIVMTQSPLSLPVTPGEPASISCRSSQSLLHQNRFNYLDWYLQKPGQS |
| | CC xI2C0- | HLE | PQLLIYLGSNRASGVPDRFSGSGSGTDFTLKISRVEAEDVGVYYCMQA |
| | scFc_delGK | molecule | LQTPFTFGCGTKVEIKGGGGSGGGGSGGGGSQVQLVESGGGVVQP |
| | | | GRSLRLSCAASGFTFSSYGIHWVRQAPGKCLEWVALTSYEGGNKYYA |
| | | | ESVKGRFTISRDNSKNTLYLQMNSLRAEDTAVYYCAKDRGTIFGDYG |
| | | | MDVWGQGTTVTVSSGGGGSEVQLVESGGGLVQPGGSLKLSCAASG |
| | | | FTFNKYAMNWVRQAPGKGLEWVARIRSKYNNYATYYADSVKDRFTI |
| | | | SRDDSKNTAYLQMNNLKTEDTAVYYCVRHGNFGNSYISYWAYWGQ |
| | | | GTLVTVSSGGGGSGGGGSGGGGSQTVVTQEPSLTVSPGGTVTLTCGS |
| | | | STGAVTSGNYPNWVQQKPGQAPRGLIGGTKFLAPGTPARFSGSLLG |
| | | | GKAALTLSGVQPEDEAEYYCVLWYSNRWVFGGGTKLTVLGGGGDKT |
| | | | HTCPPCPAPELLGGPSVFLFPPKPKDTLMISRTPEVTCVVVDVSHEDPE |
| | | | VKFNWYVDGVEVHNAKTKPCEEQYGSTYRCVSVLTVLHQDWLNGKE |
| | | | YKCKVSNKALPAPIEKTISKAKGQPREPQVYTLPPSREEMTKNQVSLTC |
| | | | LVKGFYPSDIAVEWESNGQPENNYKTTPPVLDSDGSFFLYSKLTVDKS |
| | | | RWQQGNVFSCSVMHEALHNHYTQKSLSLSPGGGGSGGGGSGGGG |
| | | | SGGGGSGGGGSGGGGSDKTHTCPPCPAPELLGGPSVFLFPPKPKDTL |
| | | | MISRTPEVTCVVVDVSHEDPEVKFNWYVDGVEVHNAKTKPCEEQYG |
| | | | STYRCVSVLTVLHQDWLNGKEYKCKVSNKALPAPIEKTISKAKGQPRE |
| | | | PQVYTLPPSREEMTKNQVSLTCLVKGFYPSDIAVEWESNGQPENNYK |
| | | | TTPPVLDSDGSFFLYSKLTVDKSRWQQGNVFSCSVMHEALHNHYTQ |
| | | | KSLSLSPGK |
| 1305. | CD19 8-C9 | VH CDR1 | SYGIH |
| | CC xI2C0-scFc | | |
| 1306. | CD19 8-C9 | VH CDR2 | LTSYEGGNKYYAESVKG |
| | CC xI2C0-scFc | | |
| 1307. | CD19 8-C9 | VH CDR3 | DRGTIFGDYGMEV |
| | CC xI2C0-scFc | | |
| 1308. | CD19 8-C9 | VL CDR1 | RSSQSLLHPNKLNYLD |
| | CC xI2C0-scFc | | |
| 1309. | CD19 8-C9 | VL CDR2 | LGSNRAS |
| | CC xI2C0-scFc | | |
| 1310. | CD19 8-C9 | VL CDR3 | MQALQTPFT |
| | CC xI2C0-scFc | | |
| 1311. | CD19 8-C9 | VH | QVQLVESGGGVVQPGRSLRLSCAASGFTFSSYGIHWVRQAPGKCLE |
| | CC xI2C0- | | WVALTSYEGGNKYYAESVKGRFTISRDNSKNTLYLQMNSLRAEDTAV |
| | scFc | | YYCAKDRGTIFGDYGMEVWGQGTTVTVSS |
| 1312. | CD19 8-C9 | VL | DIVMTQSPLSLPVTPGEPASISCRSSQSLLHPNKLNYLDWYMQKPGQ |
| | CC xI2C0- | | SPQLLIYLGSNRASGVPDRFSGSGSGTDFTLKISRVEAEDVGVYYCMQ |
| | scFc | | ALQTPFTFGCGTKVEIK |
| 1313. | CD19 8-C9 | scFv | DIVMTQSPLSLPVTPGEPASISCRSSQSLLHPNKLNYLDWYMQKPGQ |
| | CC xI2C0- | | SPQLLIYLGSNRASGVPDRFSGSGSGTDFTLKISRVEAEDVGVYYCMQ |
| | scFc | | ALQTPFTFGCGTKVEIKGGGGSGGGGSGGGGSQVQLVESGGGVVQP |
| | | | GRSLRLSCAASGFTFSSYGIHWVRQAPGKCLEWVALTSYEGGNKYYA |
| | | | ESVKGRFTISRDNSKNTLYLQMNSLRAEDTAVYYCAKDRGTIFGDYG |
| | | | MEVWGQGTTVTVSS |
| 1314 | CD19 8-C9 | bispecific | DIVMTQSPLSLPVTPGEPASISCRSSQSLLHPNKLNYLDWYMQKPGQ |
| | CC xI2C0- | molecule | SPQLLIYLGSNRASGVPDRFSGSGSGTDFTLKISRVEAEDVGVYYCMQ |
| | scFc | | ALQTPFTFGCGTKVEIKGGGGSGGGGSGGGGSQVQLVESGGGVVQP |
| | | | GRSLRLSCAASGFTFSSYGIHWVRQAPGKCLEWVALTSYEGGNKYYA |
| | | | ESVKGRFTISRDNSKNTLYLQMNSLRAEDTAVYYCAKDRGTIFGDYG |
| | | | MEVWGQGTTVTVSSGGGGSEVQLVESGGGLVQPGGSLKLSCAASG |
| | | | FTFNKYAMNWVRQAPGKGLEWVARIRSKYNNYATYYADSVKDRFTI |
| | | | SRDDSKNTAYLQMNNLKTEDTAVYYCVRHGNFGNSYISYWAYWGQ |
| | | | GTLVTVSSGGGGSGGGGSGGGGSQTVVTQEPSLTVSPGGTVTLTCGS |
| | | | STGAVTSGNYPNWVQQKPGQAPRGLIGGTKFLAPGTPARFSGSLLG |
| | | | GKAALTLSGVQPEDEAEYYCVLWYSNRWVFGGGTKLTVL |
| 1315. | CD19 8-C9 | bispecific | DIVMTQSPLSLPVTPGEPASISCRSSQSLLHPNKLNYLDWYMQKPGQ |
| | CC xI2C0- | HLE | SPQLLIYLGSNRASGVPDRFSGSGSGTDFTLKISRVEAEDVGVYYCMQ |
| | scFc | molecule | ALQTPFTFGCGTKVEIKGGGGSGGGGSGGGGSQVQLVESGGGVVQP |
| | | | GRSLRLSCAASGFTFSSYGIHWVRQAPGKCLEWVALTSYEGGNKYYA |
| | | | ESVKGRFTISRDNSKNTLYLQMNSLRAEDTAVYYCAKDRGTIFGDYG |
| | | | MEVWGQGTTVTVSSGGGGSEVQLVESGGGLVQPGGSLKLSCAASG |
| | | | FTFNKYAMNWVRQAPGKGLEWVARIRSKYNNYATYYADSVKDRFTI |
| | | | SRDDSKNTAYLQMNNLKTEDTAVYYCVRHGNFGNSYISYWAYWGQ |
| | | | GTLVTVSSGGGGSGGGGSGGGGSQTVVTQEPSLTVSPGGTVTLTCGS |
| | | | STGAVTSGNYPNWVQQKPGQAPRGLIGGTKFLAPGTPARFSGSLLG |
| | | | GKAALTLSGVQPEDEAEYYCVLWYSNRWVFGGGTKLTVLGGGGDKT |
| | | | HTCPPCPAPELLGGPSVFLFPPKPKDTLMISRTPEVTCVVVDVSHEDPE |
| | | | VKFNWYVDGVEVHNAKTKPCEEQYGSTYRCVSVLTVLHQDWLNGKE |
| | | | YKCKVSNKALPAPIEKTISKAKGQPREPQVYTLPPSREEMTKNQVSLTC |
| | | | LVKGFYPSDIAVEWESNGQPENNYKTTPPVLDSDGSFFLYSKLTVDKS |
| | | | RWQQGNVFSCSVMHEALHNHYTQKSLSLSPGKGGGGSGGGGSGG |
| | | | GGSGGGGSGGGGSGGGGSDKTHTCPPCPAPELLGGPSVFLFPPKPK |
| | | | DTLMISRTPEVTCVVVDVSHEDPEVKFNWYVDGVEVHNAKTKPCEE |
| | | | QYGSTYRCVSVLTVLHQDWLNGKEYKCKVSNKALPAPIEKTISKAKGQ |
| | | | PREPQVYTLPPSREEMTKNQVSLTCLVKGFYPSDIAVEWESNGQPEN |
| | | | NYKTTPPVLDSDGSFFLYSKLTVDKSRWQQGNVFSCSVMHEALHNH |
| | | | YTQKSLSLSPGK |
| 1316. | CD19 8-C9 | bispecific | DIVMTQSPLSLPVTPGEPASISCRSSQSLLHPNKLNYLDWYMQKPGQ |
| | CC xI2C0- | HLE | SPQLLIYLGSNRASGVPDRFSGSGSGTDFTLKISRVEAEDVGVYYCMQ |
| | scFc_delGK | molecule | ALQTPFTFGCGTKVEIKGGGGSGGGGSGGGGSQVQLVESGGGVVQP |
| | | | GRSLRLSCAASGFTFSSYGIHWVRQAPGKCLEWVALTSYEGGNKYYA |
| | | | ESVKGRFTISRDNSKNTLYLQMNSLRAEDTAVYYCAKDRGTIFGDYG |
| | | | MEVWGQGTTVTVSSGGGGSEVQLVESGGGLVQPGGSLKLSCAASG |
| | | | FTFNKYAMNWVRQAPGKGLEWVARIRSKYNNYATYYADSVKDRFTI |
| | | | SRDDSKNTAYLQMNNLKTEDTAVYYCVRHGNFGNSYISYWAYWGQ |
| | | | GTLVTVSSGGGGSGGGGSGGGGSQTVVTQEPSLTVSPGGTVTLTCGS |
| | | | STGAVTSGNYPNWVQQKPGQAPRGLIGGTKFLAPGTPARFSGSLLG |
| | | | GKAALTLSGVQPEDEAEYYCVLWYSNRWVFGGGTKLTVLGGGGDKT |
| | | | HTCPPCPAPELLGGPSVFLFPPKPKDTLMISRTPEVTCVVVDVSHEDPE |
| | | | VKFNWYVDGVEVHNAKTKPCEEQYGSTYRCVSVLTVLHQDWLNGKE |
| | | | YKCKVSNKALPAPIEKTISKAKGQPREPQVYTLPPSREEMTKNQVSLTC |
| | | | LVKGFYPSDIAVEWESNGQPENNYKTTPPVLDSDGSFFLYSKLTVDKS |
| | | | RWQQGNVFSCSVMHEALHNHYTQKSLSLSPGGGGSGGGGSGGGG |
| | | | SGGGGSGGGGSGGGGSDKTHTCPPCPAPELLGGPSVFLFPPKPKDTL |
| | | | MISRTPEVTCVVVDVSHEDPEVKFNWYVDGVEVHNAKTKPCEEQYG |
| | | | STYRCVSVLTVLHQDWLNGKEYKCKVSNKALPAPIEKTISKAKGQPRE |
| | | | PQVYTLPPSREEMTKNQVSLTCLVKGFYPSDIAVEWESNGQPENNYK |
| | | | TTPPVLDSDGSFFLYSKLTVDKSRWQQGNVFSCSVMHEALHNHYTQ |
| | | | KSLSLSPGK |
| 1317. | CD19 8-D1 | VH CDR1 | SYGIH |
| | CC xI2C0-scFc | | |
| 1318. | CD19 8-D1 | VH CDR2 | LTSYEGGNKYYAESVKG |
| | CC xI2C0-scFc | | |
| 1319. | CD19 8-D1 | VH CDR3 | DRGTIFGDYGMDV |
| | CC xI2C0-scFc | | |
| 1320. | CD19 8-D1 | VL CDR1 | RSSQSLLHKNRFNYLD |
| | CC xI2C0-scFc | | |
| 1321. | CD19 8-D1 | VL CDR2 | LGSNRAS |
| | CC xI2C0-scFc | | |
| 1322. | CD19 8-D1 | VL CDR3 | MQALQTPFT |
| | CC xI2C0-scFc | | |
| 1323. | CD19 8-D1 | VH | QVQLVESGGGVVQPGRSLRLSCAASGFTFSSYGIHWVRQAPGKCLE |
| | CC xI2C0- | | WVALTSYEGGNKYYAESVKGRFTISRDNSKNTLYLQMNSLRAEDTAV |
| | scFc | | YYCAKDRGTIFGDYGMDVWGQGTTVTVSS |
| 1324. | CD19 8-D1 | VL | DIVMTQSPLSLPVTPGEPASISCRSSQSLLHKNRFNYLDWYVQKPGQS |
| | CC xI2C0- | | PQLLIYLGSNRASGVPDRFSGSGSGTDFTLKISRVEAEDVGVYYCMQA |
| | scFc | | LQTPFTFGCGTKVEIK |
| 1325. | CD19 8-D1 | scFv | DIVMTQSPLSLPVTPGEPASISCRSSQSLLHKNRFNYLDWYVQKPGQS |
| | CC xI2C0- | | PQLLIYLGSNRASGVPDRFSGSGSGTDFTLKISRVEAEDVGVYYCMQA |
| | scFc | | LQTPFTFGCGTKVEIKGGGGSGGGGSGGGGSQVQLVESGGGVVQP |
| | | | GRSLRLSCAASGFTFSSYGIHWVRQAPGKCLEWVALTSYEGGNKYYA |
| | | | ESVKGRFTISRDNSKNTLYLQMNSLRAEDTAVYYCAKDRGTIFGDYG |
| | | | MDVWGQGTTVTVSS |
| 1326. | CD19 8-D1 | bispecific | DIVMTQSPLSLPVTPGEPASISCRSSQSLLHKNRFNYLDWYVQKPGQS |
| | CC xI2C0- | molecule | PQLLIYLGSNRASGVPDRFSGSGSGTDFTLKISRVEAEDVGVYYCMQA |
| | scFc | | LQTPFTFGCGTKVEIKGGGGSGGGGSGGGGSQVQLVESGGGVVQP |
| | | | GRSLRLSCAASGFTFSSYGIHWVRQAPGKCLEWVALTSYEGGNKYYA |
| | | | ESVKGRFTISRDNSKNTLYLQMNSLRAEDTAVYYCAKDRGTIFGDYG |
| | | | MDVWGQGTTVTVSSGGGGSEVQLVESGGGLVQPGGSLKLSCAASG |
| | | | FTFNKYAMNWVRQAPGKGLEWVARIRSKYNNYATYYADSVKDRFTI |
| | | | SRDDSKNTAYLQMNNLKTEDTAVYYCVRHGNFGNSYISYWAYWGQ |
| | | | GTLVTVSSGGGGSGGGGSGGGGSQTVVTQEPSLTVSPGGTVTLTCGS |
| | | | STGAVTSGNYPNWVQQKPGQAPRGLIGGTKFLAPGTPARFSGSLLG |
| | | | GKAALTLSGVQPEDEAEYYCVLWYSNRWVFGGGTKLTVL |
| 1327. | CD19 8-D1 | bispecific | DIVMTQSPLSLPVTPGEPASISCRSSQSLLHKNRFNYLDWYVQKPGQS |
| | CC xI2C0- | HLE | PQLLIYLGSNRASGVPDRFSGSGSGTDFTLKISRVEAEDVGVYYCMQA |
| | scFc | molecule | LQTPFTFGCGTKVEIKGGGGSGGGGSGGGGSQVQLVESGGGVVQP |
| | | | GRSLRLSCAASGFTFSSYGIHWVRQAPGKCLEWVALTSYEGGNKYYA |
| | | | ESVKGRFTISRDNSKNTLYLQMNSLRAEDTAVYYCAKDRGTIFGDYG |
| | | | MDVWGQGTTVTVSSGGGGSEVQLVESGGGLVQPGGSLKLSCAASG |
| | | | FTFNKYAMNWVRQAPGKGLEWVARIRSKYNNYATYYADSVKDRFTI |
| | | | SRDDSKNTAYLQMNNLKTEDTAVYYCVRHGNFGNSYISYWAYWGQ |
| | | | GTLVTVSSGGGGSGGGGSGGGGSQTVVTQEPSLTVSPGGTVTLTCGS |
| | | | STGAVTSGNYPNWVQQKPGQAPRGLIGGTKFLAPGTPARFSGSLLG |
| | | | GKAALTLSGVQPEDEAEYYCVLWYSNRWVFGGGTKLTVLGGGGDKT |
| | | | HTCPPCPAPELLGGPSVFLFPPKPKDTLMISRTPEVTCVVVDVSHEDPE |
| | | | VKFNWYVDGVEVHNAKTKPCEEQYGSTYRCVSVLTVLHQDWLNGKE |
| | | | YKCKVSNKALPAPIEKTISKAKGQPREPQVYTLPPSREEMTKNQVSLTC |
| | | | LVKGFYPSDIAVEWESNGQPENNYKTTPPVLDSDGSFFLYSKLTVDKS |
| | | | RWQQGNVFSCSVMHEALHNHYTQKSLSLSPGKGGGGSGGGGSGG |
| | | | GGSGGGGSGGGGSGGGGSDKTHTCPPCPAPELLGGPSVFLFPPKPK |
| | | | DTLMISRTPEVTCVVVDVSHEDPEVKFNWYVDGVEVHNAKTKPCEE |
| | | | QYGSTYRCVSVLTVLHQDWLNGKEYKCKVSNKALPAPIEKTISKAKGQ |
| | | | PREPQVYTLPPSREEMTKNQVSLTCLVKGFYPSDIAVEWESNGQPEN |
| | | | NYKTTPPVLDSDGSFFLYSKLTVDKSRWQQGNVFSCSVMHEALHNH |
| | | | YTQKSLSLSPGK |
| 1328. | CD19 8-D1 | bispecific | DIVMTQSPLSLPVTPGEPASISCRSSQSLLHKNRFNYLDWYVQKPGQS |
| | CC xI2C0- | HLE | PQLLIYLGSNRASGVPDRFSGSGSGTDFTLKISRVEAEDVGVYYCMQA |
| | scFc_delGK | molecule | LQTPFTFGCGTKVEIKGGGGSGGGGSGGGGSQVQLVESGGGVVQP |
| | | | GRSLRLSCAASGFTFSSYGIHWVRQAPGKCLEWVALTSYEGGNKYYA |
| | | | ESVKGRFTISRDNSKNTLYLQMNSLRAEDTAVYYCAKDRGTIFGDYG |
| | | | MDVWGQGTTVTVSSGGGGSEVQLVESGGGLVQPGGSLKLSCAASG |
| | | | FTFNKYAMNWVRQAPGKGLEWVARIRSKYNNYATYYADSVKDRFTI |
| | | | SRDDSKNTAYLQMNNLKTEDTAVYYCVRHGNFGNSYISYWAYWGQ |
| | | | GTLVTVSSGGGGSGGGGSGGGGSQTVVTQEPSLTVSPGGTVTLTCGS |
| | | | STGAVTSGNYPNWVQQKPGQAPRGLIGGTKFLAPGTPARFSGSLLG |
| | | | GKAALTLSGVQPEDEAEYYCVLWYSNRWVFGGGTKLTVLGGGGDKT |
| | | | HTCPPCPAPELLGGPSVFLFPPKPKDTLMISRTPEVTCVVVDVSHEDPE |
| | | | VKFNWYVDGVEVHNAKTKPCEEQYGSTYRCVSVLTVLHQDWLNGKE |
| | | | YKCKVSNKALPAPIEKTISKAKGQPREPQVYTLPPSREEMTKNQVSLTC |
| | | | LVKGFYPSDIAVEWESNGQPENNYKTTPPVLDSDGSFFLYSKLTVDKS |
| | | | RWQQGNVFSCSVMHEALHNHYTQKSLSLSPGGGGSGGGGSGGGG |
| | | | SGGGGSGGGGSGGGGSDKTHTCPPCPAPELLGGPSVFLFPPKPKDTL |
| | | | MISRTPEVTCVVVDVSHEDPEVKFNWYVDGVEVHNAKTKPCEEQYG |
| | | | STYRCVSVLTVLHQDWLNGKEYKCKVSNKALPAPIEKTISKAKGQPRE |
| | | | PQVYTLPPSREEMTKNQVSLTCLVKGFYPSDIAVEWESNGQPENNYK |
| | | | TTPPVLDSDGSFFLYSKLTVDKSRWQQGNVFSCSVMHEALHNHYTQ |
| | | | KSLSLSPGK |
| 1329. | CD19 9-A8 | VH CDR1 | SYGIH |
| | CC xI2C0-scFc | | |
| 1330. | CD19 9-A8 | VH CDR2 | LTSYEGGNKYYAESVKG |
| | CC xI2C0-scFc | | |
| 1331. | CD19 9-A8 | VH CDR3 | DRGTIFGDYGMDV |
| | CC xI2C0-scFc | | |
| 1332. | CD19 9-A8 | VL CDR1 | RSSQSLLHRNSWNYLD |
| | CC xI2C0-scFc | | |
| 1333. | CD19 9-A8 | VL CDR2 | LGSNRAS |
| | CC xI2C0-scFc | | |
| 1334. | CD19 9-A8 | VL CDR3 | MQALQTPFT |
| | CC xI2C0-scFc | | |
| 1335. | CD19 9-A8 | VH | QVQLVESGGGVVQPGRSLRLSCAASGFTFSSYGIHWVRQAPGKCLE |
| | CC xI2C0- | | WVALTSYEGGNKYYAESVKGRFTISRDNSKNTLYLQMNSLRAEDTAV |
| | scFc | | YYCAKDRGTIFGDYGMDVWGQGTTVTVSS |
| 1336. | CD19 9-A8 | VL | DIVMTQSPLSLPVTPGEPASISCRSSQSLLHRNSWNYLDWYLQKPGQ |
| | CC xI2C0- | | SPQLLIYLGSNRASGVPDRFSGSGSGTDFTLKISRVEAEDVGVYYCMQ |
| | scFc | | ALQTPFTFGCGTKVEIK |
| 1337. | CD19 9-A8 | scFv | DIVMTQSPLSLPVTPGEPASISCRSSQSLLHRNSWNYLDWYLQKPGQ |
| | CC xI2C0- | | SPQLLIYLGSNRASGVPDRFSGSGSGTDFTLKISRVEAEDVGVYYCMQ |
| | scFc | | ALQTPFTFGCGTKVEIKGGGGSGGGGSGGGGSQVQLVESGGGVVQP |
| | | | GRSLRLSCAASGFTFSSYGIHWVRQAPGKCLEWVALTSYEGGNKYYA |
| | | | ESVKGRFTISRDNSKNTLYLQMNSLRAEDTAVYYCAKDRGTIFGDYG |
| | | | MDVWGQGTTVTVSS |
| 1338. | CD19 9-A8 | bispecific | DIVMTQSPLSLPVTPGEPASISCRSSQSLLHRNSWNYLDWYLQKPGQ |
| | CC xI2C0- | molecule | SPQLLIYLGSNRASGVPDRFSGSGSGTDFTLKISRVEAEDVGVYYCMQ |
| | scFc | | ALQTPFTFGCGTKVEIKGGGGSGGGGSGGGGSQVQLVESGGGVVQP |
| | | | GRSLRLSCAASGFTFSSYGIHWVRQAPGKCLEWVALTSYEGGNKYYA |
| | | | ESVKGRFTISRDNSKNTLYLQMNSLRAEDTAVYYCAKDRGTIFGDYG |
| | | | MDVWGQGTTVTVSSGGGGSEVQLVESGGGLVQPGGSLKLSCAASG |
| | | | FTFNKYAMNWVRQAPGKGLEWVARIRSKYNNYATYYADSVKDRFTI |
| | | | SRDDSKNTAYLQMNNLKTEDTAVYYCVRHGNFGNSYISYWAYWGQ |
| | | | GTLVTVSSGGGGSGGGGSGGGGSQTVVTQEPSLTVSPGGTVTLTCGS |
| | | | STGAVTSGNYPNWVQQKPGQAPRGLIGGTKFLAPGTPARFSGSLLG |
| | | | GKAALTLSGVQPEDEAEYYCVLWYSNRWVFGGGTKLTVL |
| 1339. | CD19 9-A8 | bispecific | DIVMTQSPLSLPVTPGEPASISCRSSQSLLHRNSWNYLDWYLQKPGQ |
| | CC xI2C0- | HLE | SPQLLIYLGSNRASGVPDRFSGSGSGTDFTLKISRVEAEDVGVYYCMQ |
| | scFc | molecule | ALQTPFTFGCGTKVEIKGGGGSGGGGSGGGGSQVQLVESGGGVVQP |
| | | | GRSLRLSCAASGFTFSSYGIHWVRQAPGKCLEWVALTSYEGGNKYYA |
| | | | ESVKGRFTISRDNSKNTLYLQMNSLRAEDTAVYYCAKDRGTIFGDYG |
| | | | MDVWGQGTTVTVSSGGGGSEVQLVESGGGLVQPGGSLKLSCAASG |
| | | | FTFNKYAMNWVRQAPGKGLEWVARIRSKYNNYATYYADSVKDRFTI |
| | | | SRDDSKNTAYLQMNNLKTEDTAVYYCVRHGNFGNSYISYWAYWGQ |
| | | | GTLVTVSSGGGGSGGGGSGGGGSQTVVTQEPSLTVSPGGTVTLTCGS |
| | | | STGAVTSGNYPNWVQQKPGQAPRGLIGGTKFLAPGTPARFSGSLLG |
| | | | GKAALTLSGVQPEDEAEYYCVLWYSNRWVFGGGTKLTVLGGGGDKT |
| | | | HTCPPCPAPELLGGPSVFLFPPKPKDTLMISRTPEVTCVVVDVSHEDPE |
| | | | VKFNWYVDGVEVHNAKTKPCEEQYGSTYRCVSVLTVLHQDWLNGKE |
| | | | YKCKVSNKALPAPIEKTISKAKGQPREPQVYTLPPSREEMTKNQVSLTC |
| | | | LVKGFYPSDIAVEWESNGQPENNYKTTPPVLDSDGSFFLYSKLTVDKS |
| | | | RWQQGNVFSCSVMHEALHNHYTQKSLSLSPGKGGGGSGGGGSGG |
| | | | GGSGGGGSGGGGSGGGGSDKTHTCPPCPAPELLGGPSVFLFPPKPK |
| | | | DTLMISRTPEVTCVVVDVSHEDPEVKFNWYVDGVEVHNAKTKPCEE |
| | | | QYGSTYRCVSVLTVLHQDWLNGKEYKCKVSNKALPAPIEKTISKAKGQ |
| | | | PREPQVYTLPPSREEMTKNQVSLTCLVKGFYPSDIAVEWESNGQPEN |
| | | | NYKTTPPVLDSDGSFFLYSKLTVDKSRWQQGNVFSCSVMHEALHNH |
| | | | YTQKSLSLSPGK |
| 1340. | CD19 9-A8 | bispecific | DIVMTQSPLSLPVTPGEPASISCRSSQSLLHRNSWNYLDWYLQKPGQ |
| | CC xI2C0- | HLE | SPQLLIYLGSNRASGVPDRFSGSGSGTDFTLKISRVEAEDVGVYYCMQ |
| | scFc_delGK | molecule | ALQTPFTFGCGTKVEIKGGGGSGGGGSGGGGSQVQLVESGGGVVQP |
| | | | GRSLRLSCAASGFTFSSYGIHWVRQAPGKCLEWVALTSYEGGNKYYA |
| | | | ESVKGRFTISRDNSKNTLYLQMNSLRAEDTAVYYCAKDRGTIFGDYG |
| | | | MDVWGQGTTVTVSSGGGGSEVQLVESGGGLVQPGGSLKLSCAASG |
| | | | FTFNKYAMNWVRQAPGKGLEWVARIRSKYNNYATYYADSVKDRFTI |
| | | | SRDDSKNTAYLQMNNLKTEDTAVYYCVRHGNFGNSYISYWAYWGQ |
| | | | GTLVTVSSGGGGSGGGGSGGGGSQTVVTQEPSLTVSPGGTVTLTCGS |
| | | | STGAVTSGNYPNWVQQKPGQAPRGLIGGTKFLAPGTPARFSGSLLG |
| | | | GKAALTLSGVQPEDEAEYYCVLWYSNRWVFGGGTKLTVLGGGGDKT |
| | | | HTCPPCPAPELLGGPSVFLFPPKPKDTLMISRTPEVTCVVVDVSHEDPE |
| | | | VKFNWYVDGVEVHNAKTKPCEEQYGSTYRCVSVLTVLHQDWLNGKE |
| | | | YKCKVSNKALPAPIEKTISKAKGQPREPQVYTLPPSREEMTKNQVSLTC |
| | | | LVKGFYPSDIAVEWESNGQPENNYKTTPPVLDSDGSFFLYSKLTVDKS |
| | | | RWQQGNVFSCSVMHEALHNHYTQKSLSLSPGGGGSGGGGSGGGG |
| | | | SGGGGSGGGGSGGGGSDKTHTCPPCPAPELLGGPSVFLFPPKPKDTL |
| | | | MISRTPEVTCVVVDVSHEDPEVKFNWYVDGVEVHNAKTKPCEEQYG |
| | | | STYRCVSVLTVLHQDWLNGKEYKCKVSNKALPAPIEKTISKAKGQPRE |
| | | | PQVYTLPPSREEMTKNQVSLTCLVKGFYPSDIAVEWESNGQPENNYK |
| | | | TTPPVLDSDGSFFLYSKLTVDKSRWQQGNVFSCSVMHEALHNHYTQ |
| | | | KSLSLSPGK |
| 1341. | CD19 9-C1 | VH CDR1 | SYGIH |
| | CC xI2C0-scFc | | |
| 1342. | CD19 9-C1 | VH CDR2 | LTSYEGGNKYYAESVKG |
| | CC xI2C0-scFc | | |
| 1343. | CD19 9-C1 | VH CDR3 | DRGTIFGDYGMDV |
| | CC xI2C0-scFc | | |
| 1344. | CD19 9-C1 | VL CDR1 | RSSQSLLHPNHFNYLD |
| | CC xI2C0-scFc | | |
| 1345. | CD19 9-C1 | VL CDR2 | LGSNRAS |
| | CC xI2C0-scFc | | |
| 1346. | CD19 9-C1 | VL CDR3 | MQALQTPFT |
| | CC xI2C0-scFc | | |
| 1347. | CD19 9-C1 | VH | QVQLVESGGGVVQPGRSLRLSCAASGFTFSSYGIHWVRQAPGKCLE |
| | CC xI2C0- | | WVALTSYEGGNKYYAESVKGRFTISRDNSKNTLYLQMNSLRAEDTAV |
| | scFc | | YYCAKDRGTIFGDYGMDVWGQGTTVTVSS |
| 1348. | CD19 9-C1 | VL | DIVMTQSPLSLPVTPGEPASISCRSSQSLLHPNHFNYLDWYLQKPGQS |
| | CC xI2C0- | | PQLLIYLGSNRASGVPDRFSGSGSGTDFTLKISRVEAEDVGVYYCMQA |
| | scFc | | LQTPFTFGCGTKVEIK |
| 1349. | CD19 9-C1 | scFv | DIVMTQSPLSLPVTPGEPASISCRSSQSLLHPNHFNYLDWYLQKPGQS |
| | CC xI2C0- | | PQLLIYLGSNRASGVPDRFSGSGSGTDFTLKISRVEAEDVGVYYCMQA |
| | scFc | | LQTPFTFGCGTKVEIKGGGGSGGGGSGGGGSQVQLVESGGGVVQP |
| | | | GRSLRLSCAASGFTFSSYGIHWVRQAPGKCLEWVALTSYEGGNKYYA |
| | | | ESVKGRFTISRDNSKNTLYLQMNSLRAEDTAVYYCAKDRGTIFGDYG |
| | | | MDVWGQGTTVTVSS |
| 135. | CD19 9-C1 | bispecific | DIVMTQSPLSLPVTPGEPASISCRSSQSLLHPNHFNYLDWYLQKPGQS |
| | CC xI2C0- | molecule | PQLLIYLGSNRASGVPDRFSGSGSGTDFTLKISRVEAEDVGVYYCMQA |
| | scFc | | LQTPFTFGCGTKVEIKGGGGSGGGGSGGGGSQVQLVESGGGVVQP |
| | | | GRSLRLSCAASGFTFSSYGIHWVRQAPGKCLEWVALTSYEGGNKYYA |
| | | | ESVKGRFTISRDNSKNTLYLQMNSLRAEDTAVYYCAKDRGTIFGDYG |
| | | | MDVWGQGTTVTVSSGGGGSEVQLVESGGGLVQPGGSLKLSCAASG |
| | | | FTFNKYAMNWVRQAPGKGLEWVARIRSKYNNYATYYADSVKDRFTI |
| | | | SRDDSKNTAYLQMNNLKTEDTAVYYCVRHGNFGNSYISYWAYWGQ |
| | | | GTLVTVSSGGGGSGGGGSGGGGSQTVVTQEPSLTVSPGGTVTLTCGS |
| | | | STGAVTSGNYPNWVQQKPGQAPRGLIGGTKFLAPGTPARFSGSLLG |
| | | | GKAALTLSGVQPEDEAEYYCVLWYSNRWVFGGGTKLTVL |
| 1351. | CD19 9-C1 | bispecific | DIVMTQSPLSLPVTPGEPASISCRSSQSLLHPNHFNYLDWYLQKPGQS |
| | CC xI2C0- | HLE | PQLLIYLGSNRASGVPDRFSGSGSGTDFTLKISRVEAEDVGVYYCMQA |
| | scFc | molecule | LQTPFTFGCGTKVEIKGGGGSGGGGSGGGGSQVQLVESGGGVVQP |
| | | | GRSLRLSCAASGFTFSSYGIHWVRQAPGKCLEWVALTSYEGGNKYYA |
| | | | ESVKGRFTISRDNSKNTLYLQMNSLRAEDTAVYYCAKDRGTIFGDYG |
| | | | MDVWGQGTTVTVSSGGGGSEVQLVESGGGLVQPGGSLKLSCAASG |
| | | | FTFNKYAMNWVRQAPGKGLEWVARIRSKYNNYATYYADSVKDRFTI |
| | | | SRDDSKNTAYLQMNNLKTEDTAVYYCVRHGNFGNSYISYWAYWGQ |
| | | | GTLVTVSSGGGGSGGGGSGGGGSQTVVTQEPSLTVSPGGTVTLTCGS |
| | | | STGAVTSGNYPNWVQQKPGQAPRGLIGGTKFLAPGTPARFSGSLLG |
| | | | GKAALTLSGVQPEDEAEYYCVLWYSNRWVFGGGTKLTVLGGGGDKT |
| | | | HTCPPCPAPELLGGPSVFLFPPKPKDTLMISRTPEVTCVVVDVSHEDPE |
| | | | VKFNWYVDGVEVHNAKTKPCEEQYGSTYRCVSVLTVLHQDWLNGKE |
| | | | YKCKVSNKALPAPIEKTISKAKGQPREPQVYTLPPSREEMTKNQVSLTC |
| | | | LVKGFYPSDIAVEWESNGQPENNYKTTPPVLDSDGSFFLYSKLTVDKS |
| | | | RWQQGNVFSCSVMHEALHNHYTQKSLSLSPGKGGGGSGGGGSGG |
| | | | GGSGGGGSGGGGSGGGGSDKTHTCPPCPAPELLGGPSVFLFPPKPK |
| | | | DTLMISRTPEVTCVVVDVSHEDPEVKFNWYVDGVEVHNAKTKPCEE |
| | | | QYGSTYRCVSVLTVLHQDWLNGKEYKCKVSNKALPAPIEKTISKAKGQ |
| | | | PREPQVYTLPPSREEMTKNQVSLTCLVKGFYPSDIAVEWESNGQPEN |
| | | | NYKTTPPVLDSDGSFFLYSKLTVDKSRWQQGNVFSCSVMHEALHNH |
| | | | YTQKSLSLSPGK |
| 1352. | CD19 9-C1 | bispecific | DIVMTQSPLSLPVTPGEPASISCRSSQSLLHPNHFNYLDWYLQKPGQS |
| | CC xl2C0- | HLE | PQLLIYLGSNRASGVPDRFSGSGSGTDFTLKISRVEAEDVGVYYCMQA |
| | scFc | molecule | LQTPFTFGCGTKVEIKGGGGSGGGGSGGGGSQVQLVESGGGVVQP |
| | | | GRSLRLSCAASGFTFSSYGIHWVRQAPGKCLEWVALTSYEGGNKYYA |
| | | | ESVKGRFTISRDNSKNTLYLQMNSLRAEDTAVYYCAKDRGTIFGDYG |
| | | | MDVWGQGTTVTVSSGGGGSEVQLVESGGGLVQPGGSLKLSCAASG |
| | | | FTFNKYAMNWVRQAPGKGLEWVARIRSKYNNYATYYADSVKDRFTI |
| | | | SRDDSKNTAYLQMNNLKTEDTAVYYCVRHGNFGNSYISYWAYWGQ |
| | | | GTLVTVSSGGGGSGGGGSGGGGSQTVVTQEPSLTVSPGGTVTLTCGS |
| | | | STGAVTSGNYPNWVQQKPGQAPRGLIGGTKFLAPGTPARFSGSLLG |
| | | | GKAALTLSGVQPEDEAEYYCVLWYSNRWVFGGGTKLTVLGGGGDKT |
| | | | HTCPPCPAPELLGGPSVFLFPPKPKDTLMISRTPEVTCVVVDVSHEDPE |
| | | | VKFNWYVDGVEVHNAKTKPCEEQYGSTYRCVSVLTVLHQDWLNGKE |
| | | | YKCKVSNKALPAPIEKTISKAKGQPREPQVYTLPPSREEMTKNQVSLTC |
| | | | LVKGFYPSDIAVEWESNGQPENNYKTTPPVLDSDGSFFLYSKLTVDKS |
| | | | RWQQGNVFSCSVMHEALHNHYTQKSLSLSPGGGGSGGGGSGGGG |
| | | | SGGGGSGGGGSGGGGSDKTHTCPPCPAPELLGGPSVFLFPPKPKDTL |
| | | | MISRTPEVTCVVVDVSHEDPEVKFNWYVDGVEVHNAKTKPCEEQYG |
| | | | STYRCVSVLTVLHQDWLNGKEYKCKVSNKALPAPIEKTISKAKGQPRE |
| | | | PQVYTLPPSREEMTKNQVSLTCLVKGFYPSDIAVEWESNGQPENNYK |
| | | | TTPPVLDSDGSFFLYSKLTVDKSRWQQGNVFSCSVMHEALHNHYTQ |
| | | | KSLSLSPGK |
| 1353. | CD19 0-B6 | VH CDR1 | SYGIH |
| | CC xI2C0-scFc | | |
| 1354. | CD19 0-B6 | VH CDR2 | LTSYEGGNKYYAESVKG |
| | CC xI2C0-scFc | | |
| 1355. | CD19 0-B6 | VH CDR3 | DRGTIFGDYGMDV |
| | CC xI2C0-scFc | | |
| 1356. | CD19 0-B6 | VL CDR1 | RSSQSLLHKNSFNYLD |
| | CC xI2C0-scFc | | |
| 1357. | CD19 0-B6 | VL CDR2 | LGSNRAS |
| | CC xI2C0-scFc | | |
| 1358. | CD19 0-B6 | VL CDR3 | MQALQTPFT |
| | CC xI2C0-scFc | | |
| 1359. | CD19 0-B6 | VH | QVQLVESGGGVVQPGRSLRLSCAASGFTFSSYGIHWVRQAPGKCLE |
| | CC xI2C0- | | WVALTSYEGGNKYYAESVKGRFTISRDNSKNTLYLQMNSLRAEDTAV |
| | scFc | | YYCAKDRGTIFGDYGMDVWGQGTTVTVSS |
| 1360. | CD19 0-B6 | VL | DIVMTQSPLSLPVTPGEPASISCRSSQSLLHKNSFNYLDWYLQKPGQS |
| | CC xI2C0- | | PQLLIYLGSNRASGVPDRFSGSGSGTDFTLKISRVEAEDVGVYYCMQA |
| | scFc | | LQTPFTFGCGTKVEIK |
| 1361. | CD19 0-B6 | scFv | DIVMTQSPLSLPVTPGEPASISCRSSQSLLHKNSFNYLDWYLQKPGQS |
| | CC xI2C0- | | PQLLIYLGSNRASGVPDRFSGSGSGTDFTLKISRVEAEDVGVYYCMQA |
| | scFc | | LQTPFTFGCGTKVEIKGGGGSGGGGSGGGGSQVQLVESGGGVVQP |
| | | | GRSLRLSCAASGFTFSSYGIHWVRQAPGKCLEWVALTSYEGGNKYYA |
| | | | ESVKGRFTISRDNSKNTLYLQMNSLRAEDTAVYYCAKDRGTIFGDYG |
| | | | MDVWGQGTTVTVSS |
| 1362. | CD19 0-B6 | bispecific | DIVMTQSPLSLPVTPGEPASISCRSSQSLLHKNSFNYLDWYLQKPGQS |
| | CC xI2C0- | molecule | PQLLIYLGSNRASGVPDRFSGSGSGTDFTLKISRVEAEDVGVYYCMQA |
| | scFc | | LQTPFTFGCGTKVEIKGGGGSGGGGSGGGGSQVQLVESGGGVVQP |
| | | | GRSLRLSCAASGFTFSSYGIHWVRQAPGKCLEWVALTSYEGGNKYYA |
| | | | ESVKGRFTISRDNSKNTLYLQMNSLRAEDTAVYYCAKDRGTIFGDYG |
| | | | MDVWGQGTTVTVSSGGGGSEVQLVESGGGLVQPGGSLKLSCAASG |
| | | | FTFNKYAMNWVRQAPGKGLEWVARIRSKYNNYATYYADSVKDRFTI |
| | | | SRDDSKNTAYLQMNNLKTEDTAVYYCVRHGNFGNSYISYWAYWGQ |
| | | | GTLVTVSSGGGGSGGGGSGGGGSQTVVTQEPSLTVSPGGTVTLTCGS |
| | | | STGAVTSGNYPNWVQQKPGQAPRGLIGGTKFLAPGTPARFSGSLLG |
| | | | GKAALTLSGVQPEDEAEYYCVLWYSNRWVFGGGTKLTVL |
| 1363. | CD19 0-B6 | bispecific | DIVMTQSPLSLPVTPGEPASISCRSSQSLLHKNSFNYLDWYLQKPGQS |
| | CC xI2C0- | HLE | PQLLIYLGSNRASGVPDRFSGSGSGTDFTLKISRVEAEDVGVYYCMQA |
| | scFc | molecule | LQTPFTFGCGTKVEIKGGGGSGGGGSGGGGSQVQLVESGGGVVQP |
| | | | GRSLRLSCAASGFTFSSYGIHWVRQAPGKCLEWVALTSYEGGNKYYA |
| | | | ESVKGRFTISRDNSKNTLYLQMNSLRAEDTAVYYCAKDRGTIFGDYG |
| | | | MDVWGQGTTVTVSSGGGGSEVQLVESGGGLVQPGGSLKLSCAASG |
| | | | FTFNKYAMNWVRQAPGKGLEWVARIRSKYNNYATYYADSVKDRFTI |
| | | | SRDDSKNTAYLQMNNLKTEDTAVYYCVRHGNFGNSYISYWAYWGQ |
| | | | GTLVTVSSGGGGSGGGGSGGGGSQTVVTQEPSLTVSPGGTVTLTCGS |
| | | | STGAVTSGNYPNWVQQKPGQAPRGLIGGTKFLAPGTPARFSGSLLG |
| | | | GKAALTLSGVQPEDEAEYYCVLWYSNRWVFGGGTKLTVLGGGGDKT |
| | | | HTCPPCPAPELLGGPSVFLFPPKPKDTLMISRTPEVTCVVVDVSHEDPE |
| | | | VKFNWYVDGVEVHNAKTKPCEEQYGSTYRCVSVLTVLHQDWLNGKE |
| | | | YKCKVSNKALPAPIEKTISKAKGQPREPQVYTLPPSREEMTKNQVSLTC |
| | | | LVKGFYPSDIAVEWESNGQPENNYKTTPPVLDSDGSFFLYSKLTVDKS |
| | | | RWQQGNVFSCSVMHEALHNHYTQKSLSLSPGKGGGGSGGGGSGG |
| | | | GGSGGGGSGGGGSGGGGSDKTHTCPPCPAPELLGGPSVFLFPPKPK |
| | | | DTLMISRTPEVTCVVVDVSHEDPEVKFNWYVDGVEVHNAKTKPCEE |
| | | | QYGSTYRCVSVLTVLHQDWLNGKEYKCKVSNKALPAPIEKTISKAKGQ |
| | | | PREPQVYTLPPSREEMTKNQVSLTCLVKGFYPSDIAVEWESNGQPEN |
| | | | NYKTTPPVLDSDGSFFLYSKLTVDKSRWQQGNVFSCSVMHEALHNH |
| | | | YTQKSLSLSPGK |
| 1364. | CD19 0-B6 | bispecific | DIVMTQSPLSLPVTPGEPASISCRSSQSLLHKNSFNYLDWYLQKPGQS |
| | CC xI2C0- | HLE | PQLLIYLGSNRASGVPDRFSGSGSGTDFTLKISRVEAEDVGVYYCMQA |
| | scFc_delGK | molecule | LQTPFTFGCGTKVEIKGGGGSGGGGSGGGGSQVQLVESGGGVVQP |
| | | | GRSLRLSCAASGFTFSSYGIHWVRQAPGKCLEWVALTSYEGGNKYYA |
| | | | ESVKGRFTISRDNSKNTLYLQMNSLRAEDTAVYYCAKDRGTIFGDYG |
| | | | MDVWGQGTTVTVSSGGGGSEVQLVESGGGLVQPGGSLKLSCAASG |
| | | | FTFNKYAMNWVRQAPGKGLEWVARIRSKYNNYATYYADSVKDRFTI |
| | | | SRDDSKNTAYLQMNNLKTEDTAVYYCVRHGNFGNSYISYWAYWGQ |
| | | | GTLVTVSSGGGGSGGGGSGGGGSQTVVTQEPSLTVSPGGTVTLTCGS |
| | | | STGAVTSGNYPNWVQQKPGQAPRGLIGGTKFLAPGTPARFSGSLLG |
| | | | GKAALTLSGVQPEDEAEYYCVLWYSNRWVFGGGTKLTVLGGGGDKT |
| | | | HTCPPCPAPELLGGPSVFLFPPKPKDTLMISRTPEVTCVVVDVSHEDPE |
| | | | VKFNWYVDGVEVHNAKTKPCEEQYGSTYRCVSVLTVLHQDWLNGKE |
| | | | YKCKVSNKALPAPIEKTISKAKGQPREPQVYTLPPSREEMTKNQVSLTC |
| | | | LVKGFYPSDIAVEWESNGQPENNYKTTPPVLDSDGSFFLYSKLTVDKS |
| | | | RWQQGNVFSCSVMHEALHNHYTQKSLSLSPGGGGSGGGGSGGGG |
| | | | SGGGGSGGGGSGGGGSDKTHTCPPCPAPELLGGPSVFLFPPKPKDTL |
| | | | MISRTPEVTCVVVDVSHEDPEVKFNWYVDGVEVHNAKTKPCEEQYG |
| | | | STYRCVSVLTVLHQDWLNGKEYKCKVSNKALPAPIEKTISKAKGQPRE |
| | | | PQVYTLPPSREEMTKNQVSLTCLVKGFYPSDIAVEWESNGQPENNYK |
| | | | TTPPVLDSDGSFFLYSKLTVDKSRWQQGNVFSCSVMHEALHNHYTQ |
| | | | KSLSLSPGK |
| 1365. | CD19 0-C12 | VH CDR1 | SYGIH |
| | CC xI2C0- | | |
| | scFc | | |
| 1366. | CD19 0-C12 | VH CDR2 | LTSYEGGNKYYAESVKG |
| | CC xI2C0- | | |
| | scFc | | |
| 1367. | CD19 0-C12 | VH CDR3 | DRGTIFGDYGMDV |
| | CC xI2C0- | | |
| | scFc | | |
| 1368. | CD19 0-C12 | VL CDR1 | RSSQSLLHKNHFNYLD |
| | CC xI2C0- | | |
| | scFc | | |
| 1369. | CD19 0-C12 | VL CDR2 | LGSNRAS |
| | CC xI2C0- | | |
| | scFc | | |
| 1370. | CD19 0-C12 | VL CDR3 | MQALQTPFT |
| | CC xI2C0- | | |
| | scFc | | |
| 1371. | CD19 0-C12 | VH | QVQLVESGGGVVQPGRSLRLSCAASGFTFSSYGIHWVRQAPGKCLE |
| | CC xI2C0- | | WVALTSYEGGNKYYAESVKGRFTISRDNSKNTLYLQMNSLRAEDTAV |
| | scFc | | YYCAKDRGTIFGDYGMDVWGQGTTVTVSS |
| 1372. | CD19 0-C12 | VL | DIVMTQSPLSLPVTPGEPASISCRSSQSLLHKNHFNYLDWYLQKPGQS |
| | CC xI2C0- | | PQLLIYLGSNRASGVPDRFSGSGSGTDFTLKISRVEAEDVGVYYCMQA |
| | scFc | | LQTPFTFGCGTKVEIK |
| 1373. | CD19 0-C12 | scFv | DIVMTQSPLSLPVTPGEPASISCRSSQSLLHKNHFNYLDWYLQKPGQS |
| | CC xI2C0- | | PQLLIYLGSNRASGVPDRFSGSGSGTDFTLKISRVEAEDVGVYYCMQA |
| | scFc | | LQTPFTFGCGTKVEIKGGGGSGGGGSGGGGSQVQLVESGGGVVQP |
| | | | GRSLRLSCAASGFTFSSYGIHWVRQAPGKCLEWVALTSYEGGNKYYA |
| | | | ESVKGRFTISRDNSKNTLYLQMNSLRAEDTAVYYCAKDRGTIFGDYG |
| | | | MDVWGQGTTVTVSS |
| 1374. | CD19 0-C12 | bispecific | DIVMTQSPLSLPVTPGEPASISCRSSQSLLHKNHFNYLDWYLQKPGQS |
| | CC xI2C0- | molecule | PQLLIYLGSNRASGVPDRFSGSGSGTDFTLKISRVEAEDVGVYYCMQA |
| | scFc | | LQTPFTFGCGTKVEIKGGGGSGGGGSGGGGSQVQLVESGGGVVQP |
| | | | GRSLRLSCAASGFTFSSYGIHWVRQAPGKCLEWVALTSYEGGNKYYA |
| | | | ESVKGRFTISRDNSKNTLYLQMNSLRAEDTAVYYCAKDRGTIFGDYG |
| | | | MDVWGQGTTVTVSSGGGGSEVQLVESGGGLVQPGGSLKLSCAASG |
| | | | FTFNKYAMNWVRQAPGKGLEWVARIRSKYNNYATYYADSVKDRFTI |
| | | | SRDDSKNTAYLQMNNLKTEDTAVYYCVRHGNFGNSYISYWAYWGQ |
| | | | GTLVTVSSGGGGSGGGGSGGGGSQTVVTQEPSLTVSPGGTVTLTCGS |
| | | | STGAVTSGNYPNWVQQKPGQAPRGLIGGTKFLAPGTPARFSGSLLG |
| | | | GKAALTLSGVQPEDEAEYYCVLWYSNRWVFGGGTKLTVL |
| 1375. | CD19 0-C12 | bispecific | DIVMTQSPLSLPVTPGEPASISCRSSQSLLHKNHFNYLDWYLQKPGQS |
| | CC xI2C0- | HLE | PQLLIYLGSNRASGVPDRFSGSGSGTDFTLKISRVEAEDVGVYYCMQA |
| | scFc | molecule | LQTPFTFGCGTKVEIKGGGGSGGGGSGGGGSQVQLVESGGGVVQP |
| | | | GRSLRLSCAASGFTFSSYGIHWVRQAPGKCLEWVALTSYEGGNKYYA |
| | | | ESVKGRFTISRDNSKNTLYLQMNSLRAEDTAVYYCAKDRGTIFGDYG |
| | | | MDVWGQGTTVTVSSGGGGSEVQLVESGGGLVQPGGSLKLSCAASG |
| | | | FTFNKYAMNWVRQAPGKGLEWVARIRSKYNNYATYYADSVKDRFTI |
| | | | SRDDSKNTAYLQMNNLKTEDTAVYYCVRHGNFGNSYISYWAYWGQ |
| | | | GTLVTVSSGGGGSGGGGSGGGGSQTVVTQEPSLTVSPGGTVTLTCGS |
| | | | STGAVTSGNYPNWVQQKPGQAPRGLIGGTKFLAPGTPARFSGSLLG |
| | | | GKAALTLSGVQPEDEAEYYCVLWYSNRWVFGGGTKLTVLGGGGDKT |
| | | | HTCPPCPAPELLGGPSVFLFPPKPKDTLMISRTPEVTCVVVDVSHEDPE |
| | | | VKFNWYVDGVEVHNAKTKPCEEQYGSTYRCVSVLTVLHQDWLNGKE |
| | | | YKCKVSNKALPAPIEKTISKAKGQPREPQVYTLPPSREEMTKNQVSLTC |
| | | | LVKGFYPSDIAVEWESNGQPENNYKTTPPVLDSDGSFFLYSKLTVDKS |
| | | | RWQQGNVFSCSVMHEALHNHYTQKSLSLSPGKGGGGSGGGGSGG |
| | | | GGSGGGGSGGGGSGGGGSDKTHTCPPCPAPELLGGPSVFLFPPKPK |
| | | | DTLMISRTPEVTCVVVDVSHEDPEVKFNWYVDGVEVHNAKTKPCEE |
| | | | QYGSTYRCVSVLTVLHQDWLNGKEYKCKVSNKALPAPIEKTISKAKGQ |
| | | | PREPQVYTLPPSREEMTKNQVSLTCLVKGFYPSDIAVEWESNGQPEN |
| | | | NYKTTPPVLDSDGSFFLYSKLTVDKSRWQQGNVFSCSVMHEALHNH |
| | | | YTQKSLSLSPGK |
| 1376. | CD19 0-C12 | bispecific | DIVMTQSPLSLPVTPGEPASISCRSSQSLLHKNHFNYLDWYLQKPGQS |
| | CC xI2C0- | HLE | PQLLIYLGSNRASGVPDRFSGSGSGTDFTLKISRVEAEDVGVYYCMQA |
| | scFc_delGK | molecule | LQTPFTFGCGTKVEIKGGGGSGGGGSGGGGSQVQLVESGGGVVQP |
| | | | GRSLRLSCAASGFTFSSYGIHWVRQAPGKCLEWVALTSYEGGNKYYA |
| | | | ESVKGRFTISRDNSKNTLYLQMNSLRAEDTAVYYCAKDRGTIFGDYG |
| | | | MDVWGQGTTVTVSSGGGGSEVQLVESGGGLVQPGGSLKLSCAASG |
| | | | FTFNKYAMNWVRQAPGKGLEWVARIRSKYNNYATYYADSVKDRFTI |
| | | | SRDDSKNTAYLQMNNLKTEDTAVYYCVRHGNFGNSYISYWAYWGQ |
| | | | GTLVTVSSGGGGSGGGGSGGGGSQTVVTQEPSLTVSPGGTVTLTCGS |
| | | | STGAVTSGNYPNWVQQKPGQAPRGLIGGTKFLAPGTPARFSGSLLG |
| | | | GKAALTLSGVQPEDEAEYYCVLWYSNRWVFGGGTKLTVLGGGGDKT |
| | | | HTCPPCPAPELLGGPSVFLFPPKPKDTLMISRTPEVTCVVVDVSHEDPE |
| | | | VKFNWYVDGVEVHNAKTKPCEEQYGSTYRCVSVLTVLHQDWLNGKE |
| | | | YKCKVSNKALPAPIEKTISKAKGQPREPQVYTLPPSREEMTKNQVSLTC |
| | | | LVKGFYPSDIAVEWESNGQPENNYKTTPPVLDSDGSFFLYSKLTVDKS |
| | | | RWQQGNVFSCSVMHEALHNHYTQKSLSLSPGGGGSGGGGSGGGG |
| | | | SGGGGSGGGGSGGGGSDKTHTCPPCPAPELLGGPSVFLFPPKPKDTL |
| | | | MISRTPEVTCVVVDVSHEDPEVKFNWYVDGVEVHNAKTKPCEEQYG |
| | | | STYRCVSVLTVLHQDWLNGKEYKCKVSNKALPAPIEKTISKAKGQPRE |
| | | | PQVYTLPPSREEMTKNQVSLTCLVKGFYPSDIAVEWESNGQPENNYK |
| | | | TTPPVLDSDGSFFLYSKLTVDKSRWQQGNVFSCSVMHEALHNHYTQ |
| | | | KSLSLSPGK |
| 1377. | CD19 4- | VH CDR1 | NYGMH |
| | C1RE-B10 CC | | |
| | xI2C0-scFc | | |
| 1378. | CD19 4- | VH CDR2 | VMSWEGSNKYYAEPVKG |
| | C1RE-B10 CC | | |
| | xI2C0-scFc | | |
| 1379. | CD19 4- | VH CDR3 | DRGTIFGYYGMDV |
| | C1RE-B10 CC | | |
| | xI2C0-scFc | | |
| 1380. | CD19 4- | VL CDR1 | RSSQSLLHKNNFNYLD |
| | C1RE-B10 CC | | |
| | xI2C0-scFc | | |
| 1381. | CD19 4- | VL CDR2 | LGSNRAS |
| | C1RE-B10 CC | | |
| | xI2C0-scFc | | |
| 1382. | CD19 4- | VL CDR3 | MQALQTPLT |
| | C1RE-B10 CC | | |
| | xI2C0-scFc | | |
| 1383. | CD19 4- | VH | QVQLVESGGGVVQPGRSLRLSCEASGFIVSNYGMHWVRQAPGKCLE |
| | C1RE-B10 CC | | WVAVMSWEGSNKYYAEPVKGRFTISRDKSKNTLSLQMSSLRAEDTAL |
| | xI2C0-scFc | | YYCARDRGTIFGYYGMDVWGQGTTVTVSS |
| 1384. | CD19 4- | VL | DIVMTQSPLSLPVTPGEPASISCRSSQSLLHKNNFNYLDWYLQKPGQS |
| | C1RE-B10 CC | | PQLLIYLGSNRASGVPDRFSGSGSGTDFTLKISRVEAEDVGVYYCMQA |
| | xI2C0-scFc | | LQTPLTFACGTKVEIK |
| 1385. | CD19 4- | scFv | DIVMTQSPLSLPVTPGEPASISCRSSQSLLHKNNFNYLDWYLQKPGQS |
| | C1RE-B10 CC | | PQLLIYLGSNRASGVPDRFSGSGSGTDFTLKISRVEAEDVGVYYCMQA |
| | xI2C0-scFc | | LQTPLTFACGTKVEIKGGGGSGGGGSGGGGSQVQLVESGGGVVQPG |
| | | | RSLRLSCEASGFIVSNYGMHWVRQAPGKCLEWVAVMSWEGSNKYY |
| | | | AEPVKGRFTISRDKSKNTLSLQMSSLRAEDTALYYCARDRGTIFGYYG |
| | | | MDVWGQGTTVTVSS |
| 1386. | CD19 4- | bispecific | DIVMTQSPLSLPVTPGEPASISCRSSQSLLHKNNFNYLDWYLQKPGQS |
| | C1RE-B10 CC | molecule | PQLLIYLGSNRASGVPDRFSGSGSGTDFTLKISRVEAEDVGVYYCMQA |
| | xI2C0-scFc | | LQTPLTFACGTKVEIKGGGGSGGGGSGGGGSQVQLVESGGGVVQPG |
| | | | RSLRLSCEASGFIVSNYGMHWVRQAPGKCLEWVAVMSWEGSNKYY |
| | | | AEPVKGRFTISRDKSKNTLSLQMSSLRAEDTALYYCARDRGTIFGYYG |
| | | | MDVWGQGTTVTVSSGGGGSEVQLVESGGGLVQPGGSLKLSCAASG |
| | | | FTFNKYAMNWVRQAPGKGLEWVARIRSKYNNYATYYADSVKDRFTI |
| | | | SRDDSKNTAYLQMNNLKTEDTAVYYCVRHGNFGNSYISYWAYWGQ |
| | | | GTLVTVSSGGGGSGGGGSGGGGSQTVVTQEPSLTVSPGGTVTLTCGS |
| | | | STGAVTSGNYPNWVQQKPGQAPRGLIGGTKFLAPGTPARFSGSLLG |
| | | | GKAALTLSGVQPEDEAEYYCVLWYSNRWVFGGGTKLTVL |
| 1387. | CD19 4- | bispecific | DIVMTQSPLSLPVTPGEPASISCRSSQSLLHKNNFNYLDWYLQKPGQS |
| | C1RE-B10 CC | HLE | PQLLIYLGSNRASGVPDRFSGSGSGTDFTLKISRVEAEDVGVYYCMQA |
| | xI2C0-scFc | molecule | LQTPLTFACGTKVEIKGGGGSGGGGSGGGGSQVQLVESGGGVVQPG |
| | | | RSLRLSCEASGFIVSNYGMHWVRQAPGKCLEWVAVMSWEGSNKYY |
| | | | AEPVKGRFTISRDKSKNTLSLQMSSLRAEDTALYYCARDRGTIFGYYG |
| | | | MDVWGQGTTVTVSSGGGGSEVQLVESGGGLVQPGGSLKLSCAASG |
| | | | FTFNKYAMNWVRQAPGKGLEWVARIRSKYNNYATYYADSVKDRFTI |
| | | | SRDDSKNTAYLQMNNLKTEDTAVYYCVRHGNFGNSYISYWAYWGQ |
| | | | GTLVTVSSGGGGSGGGGSGGGGSQTVVTQEPSLTVSPGGTVTLTCGS |
| | | | STGAVTSGNYPNWVQQKPGQAPRGLIGGTKFLAPGTPARFSGSLLG |
| | | | GKAALTLSGVQPEDEAEYYCVLWYSNRWVFGGGTKLTVLGGGGDKT |
| | | | HTCPPCPAPELLGGPSVFLFPPKPKDTLMISRTPEVTCVVVDVSHEDPE |
| | | | VKFNWYVDGVEVHNAKTKPCEEQYGSTYRCVSVLTVLHQDWLNGKE |
| | | | YKCKVSNKALPAPIEKTISKAKGQPREPQVYTLPPSREEMTKNQVSLTC |
| | | | LVKGFYPSDIAVEWESNGQPENNYKTTPPVLDSDGSFFLYSKLTVDKS |
| | | | RWQQGNVFSCSVMHEALHNHYTQKSLSLSPGKGGGGSGGGGSGG |
| | | | GGSGGGGSGGGGSGGGGSDKTHTCPPCPAPELLGGPSVFLFPPKPK |
| | | | DTLMISRTPEVTCVVVDVSHEDPEVKFNWYVDGVEVHNAKTKPCEE |
| | | | QYGSTYRCVSVLTVLHQDWLNGKEYKCKVSNKALPAPIEKTISKAKGQ |
| | | | PREPQVYTLPPSREEMTKNQVSLTCLVKGFYPSDIAVEWESNGQPEN |
| | | | NYKTTPPVLDSDGSFFLYSKLTVDKSRWQQGNVFSCSVMHEALHNH |
| | | | YTQKSLSLSPGK |
| 1388. | CD19 4- | bispecific | DIVMTQSPLSLPVTPGEPASISCRSSQSLLHKNNFNYLDWYLQKPGQS |
| | C1RE-B10 CC | HLE | PQLLIYLGSNRASGVPDRFSGSGSGTDFTLKISRVEAEDVGVYYCMQA |
| | x I2C0- | molecule | LQTPLTFACGTKVEIKGGGGSGGGGSGGGGSQVQLVESGGGVVQPG |
| | scFc_delGK | | RSLRLSCEASGFIVSNYGMHWVRQAPGKCLEWVAVMSWEGSNKYY |
| | | | AEPVKGRFTISRDKSKNTLSLQMSSLRAEDTALYYCARDRGTIFGYYG |
| | | | MDVWGQGTTVTVSSGGGGSEVQLVESGGGLVQPGGSLKLSCAASG |
| | | | FTFNKYAMNWVRQAPGKGLEWVARIRSKYNNYATYYADSVKDRFTI |
| | | | SRDDSKNTAYLQMNNLKTEDTAVYYCVRHGNFGNSYISYWAYWGQ |
| | | | GTLVTVSSGGGGSGGGGSGGGGSQTVVTQEPSLTVSPGGTVTLTCGS |
| | | | STGAVTSGNYPNWVQQKPGQAPRGLIGGTKFLAPGTPARFSGSLLG |
| | | | GKAALTLSGVQPEDEAEYYCVLWYSNRWVFGGGTKLTVLGGGGDKT |
| | | | HTCPPCPAPELLGGPSVFLFPPKPKDTLMISRTPEVTCVVVDVSHEDPE |
| | | | VKFNWYVDGVEVHNAKTKPCEEQYGSTYRCVSVLTVLHQDWLNGKE |
| | | | YKCKVSNKALPAPIEKTISKAKGQPREPQVYTLPPSREEMTKNQVSLTC |
| | | | LVKGFYPSDIAVEWESNGQPENNYKTTPPVLDSDGSFFLYSKLTVDKS |
| | | | RWQQGNVFSCSVMHEALHNHYTQKSLSLSPGGGGSGGGGSGGGG |
| | | | SGGGGSGGGGSGGGGSDKTHTCPPCPAPELLGGPSVFLFPPKPKDTL |
| | | | MISRTPEVTCVVVDVSHEDPEVKFNWYVDGVEVHNAKTKPCEEQYG |
| | | | STYRCVSVLTVLHQDWLNGKEYKCKVSNKALPAPIEKTISKAKGQPRE |
| | | | PQVYTLPPSREEMTKNQVSLTCLVKGFYPSDIAVEWESNGQPENNYK |
| | | | TTPPVLDSDGSFFLYSKLTVDKSRWQQGNVFSCSVMHEALHNHYTQ |
| | | | KSLSLSPGK |
| 1389. | CD19 97- | VH CDR1 | SYGMH |
| | G1RE CC x | | |
| | I2C0-scFc | | |
| 1390. | CD19 97- | VH CDR2 | VISYEGSNKYYAESVKG |
| | G1RE CC x | | |
| | I2C0-scFc | | |
| 1391. | CD19 97- | VH CDR3 | DRGTIFGNYGLEV |
| | G1RE CC x | | |
| | I2C0-scFc | | |
| 1392. | CD19 97- | VL CDR1 | RSSQSLLHGNRFNYLD |
| | G1RE CC x | | |
| | I2C0-scFc | | |
| 1393. | CD19 97- | VL CDR2 | LGSNRAS |
| | G1RE CC x | | |
| | I2C0-scFc | | |
| 1394. | CD19 97- | VL CDR3 | MQALQTPFT |
| | G1RE CC x | | |
| | I2C0-scFc | | |
| 1395. | CD19 97- | VH | QVQLVESGGGVVQPGRSLRLSCAASGFTFSSYGMHWVRQAPGKCLE |
| | G1RE CC x | | WVAVISYEGSNKYYAESVKGRFTISRDNSKNTLYLQMNSLRDEDTAVY |
| | I2C0-scFc | | YCARDRGTIFGNYGLEVWGQGTTVTVSS |
| 1396. | CD19 97- | VL | DIVMTQSPLSLPVISGEPASISCRSSQSLLHGNRFNYLDWYLQKPGQSP |
| | G1RE CC x | | QLLIYLGSNRASGVPDRFSGSGSGTDFTLKISRVEAEDVGVYYCMQAL |
| | I2C0-scFc | | QTPFTFGCGTKVDIK |
| 1397. | CD19 97- | scFv | DIVMTQSPLSLPVISGEPASISCRSSQSLLHGNRFNYLDWYLQKPGQSP |
| | G1RE CC x | | QLLIYLGSNRASGVPDRFSGSGSGTDFTLKISRVEAEDVGVYYCMQAL |
| | I2C0-scFc | | QTPFTFGCGTKVDIKGGGGSGGGGSGGGGSQVQLVESGGGVVQPG |
| | | | RSLRLSCAASGFTFSSYGMHWVRQAPGKCLEWVAVISYEGSNKYYAE |
| | | | SVKGRFTISRDNSKNTLYLQMNSLRDEDTAVYYCARDRGTIFGNYGLE |
| | | | VWGQGTTVTVSS |
| 1398. | CD19 97- | bispecific | DIVMTQSPLSLPVISGEPASISCRSSQSLLHGNRFNYLDWYLQKPGQSP |
| | G1RE CC x | molecule | QLLIYLGSNRASGVPDRFSGSGSGTDFTLKISRVEAEDVGVYYCMQAL |
| | I2C0-scFc | | QTPFTFGCGTKVDIKGGGGSGGGGSGGGGSQVQLVESGGGVVQPG |
| | | | RSLRLSCAASGFTFSSYGMHWVRQAPGKCLEWVAVISYEGSNKYYAE |
| | | | SVKGRFTISRDNSKNTLYLQMNSLRDEDTAVYYCARDRGTIFGNYGLE |
| | | | VWGQGTTVTVSSGGGGSEVQLVESGGGLVQPGGSLKLSCAASGFTF |
| | | | NKYAMNWVRQAPGKGLEWVARIRSKYNNYATYYADSVKDRFTISRD |
| | | | DSKNTAYLQMNNLKTEDTAVYYCVRHGNFGNSYISYWAYWGQGTL |
| | | | VTVSSGGGGSGGGGSGGGGSQTVVTQEPSLTVSPGGTVTLTCGSST |
| | | | GAVTSGNYPNWVQQKPGQAPRGLIGGTKFLAPGTPARFSGSLLGGK |
| | | | AALTLSGVQPEDEAEYYCVLWYSNRWVFGGGTKLTVL |
| 1399. | CD19 97- | bispecific | DIVMTQSPLSLPVISGEPASISCRSSQSLLHGNRFNYLDWYLQKPGQSP |
| | G1RE CC x | HLE | QLLIYLGSNRASGVPDRFSGSGSGTDFTLKISRVEAEDVGVYYCMQAL |
| | I2C0-scFc | molecule | QTPFTFGCGTKVDIKGGGGSGGGGSGGGGSQVQLVESGGGVVQPG |
| | | | RSLRLSCAASGFTFSSYGMHWVRQAPGKCLEWVAVISYEGSNKYYAE |
| | | | SVKGRFTISRDNSKNTLYLQMNSLRDEDTAVYYCARDRGTIFGNYGLE |
| | | | VWGQGTTVTVSSGGGGSEVQLVESGGGLVQPGGSLKLSCAASGFTF |
| | | | NKYAMNWVRQAPGKGLEWVARIRSKYNNYATYYADSVKDRFTISRD |
| | | | DSKNTAYLQMNNLKTEDTAVYYCVRHGNFGNSYISYWAYWGQGTL |
| | | | VTVSSGGGGSGGGGSGGGGSQTVVTQEPSLTVSPGGTVTLTCGSST |
| | | | GAVTSGNYPNWVQQKPGQAPRGLIGGTKFLAPGTPARFSGSLLGGK |
| | | | AALTLSGVQPEDEAEYYCVLWYSNRWVFGGGTKLTVLGGGGDKTHT |
| | | | CPPCPAPELLGGPSVFLFPPKPKDTLMISRTPEVTCVVVDVSHEDPEVK |
| | | | FNWYVDGVEVHNAKTKPCEEQYGSTYRCVSVLTVLHQDWLNGKEYK |
| | | | CKVSNKALPAPIEKTISKAKGQPREPQVYTLPPSREEMTKNQVSLTCLV |
| | | | KGFYPSDIAVEWESNGQPENNYKTTPPVLDSDGSFFLYSKLTVDKSR |
| | | | WQQGNVFSCSVMHEALHNHYTQKSLSLSPGKGGGGSGGGGSGGG |
| | | | GSGGGGSGGGGSGGGGSDKTHTCPPCPAPELLGGPSVFLFPPKPKDT |
| | | | LMISRTPEVTCVVVDVSHEDPEVKFNWYVDGVEVHNAKTKPCEEQY |
| | | | GSTYRCVSVLTVLHQDWLNGKEYKCKVSNKALPAPIEKTISKAKGQPR |
| | | | EPQVYTLPPSREEMTKNQVSLTCLVKGFYPSDIAVEWESNGQPENNY |
| | | | KTTPPVLDSDGSFFLYSKLTVDKSRWQQGNVFSCSVMHEALHNHYT |
| | | | QKSLSLSPGK |
| 1400. | CD19 97- | bispecific | DIVMTQSPLSLPVISGEPASISCRSSQSLLHGNRFNYLDWYLQKPGQSP |
| | G1RE CC x | HLE | QLLIYLGSNRASGVPDRFSGSGSGTDFTLKISRVEAEDVGVYYCMQAL |
| | I2C0- | molecule | QTPFTFGCGTKVDIKGGGGSGGGGSGGGGSQVQLVESGGGVVQPG |
| | scFc_delGK | | RSLRLSCAASGFTFSSYGMHWVRQAPGKCLEWVAVISYEGSNKYYAE |
| | | | SVKGRFTISRDNSKNTLYLQMNSLRDEDTAVYYCARDRGTIFGNYGLE |
| | | | VWGQGTTVTVSSGGGGSEVQLVESGGGLVQPGGSLKLSCAASGFTF |
| | | | NKYAMNWVRQAPGKGLEWVARIRSKYNNYATYYADSVKDRFTISRD |
| | | | DSKNTAYLQMNNLKTEDTAVYYCVRHGNFGNSYISYWAYWGQGTL |
| | | | VTVSSGGGGSGGGGSGGGGSQTVVTQEPSLTVSPGGTVTLTCGSST |
| | | | GAVTSGNYPNWVQQKPGQAPRGLIGGTKFLAPGTPARFSGSLLGGK |
| | | | AALTLSGVQPEDEAEYYCVLWYSNRWVFGGGTKLTVLGGGGDKTHT |
| | | | CPPCPAPELLGGPSVFLFPPKPKDTLMISRTPEVTCVVVDVSHEDPEVK |
| | | | FNWYVDGVEVHNAKTKPCEEQYGSTYRCVSVLTVLHQDWLNGKEYK |
| | | | CKVSNKALPAPIEKTISKAKGQPREPQVYTLPPSREEMTKNQVSLTCLV |
| | | | KGFYPSDIAVEWESNGQPENNYKTTPPVLDSDGSFFLYSKLTVDKSR |
| | | | WQQGNVFSCSVMHEALHNHYTQKSLSLSPGGGGSGGGGSGGGGS |
| | | | GGGGSGGGGSGGGGSDKTHTCPPCPAPELLGGPSVFLFPPKPKDTL |
| | | | MISRTPEVTCVVVDVSHEDPEVKFNWYVDGVEVHNAKTKPCEEQYG |
| | | | STYRCVSVLTVLHQDWLNGKEYKCKVSNKALPAPIEKTISKAKGQPRE |
| | | | PQVYTLPPSREEMTKNQVSLTCLVKGFYPSDIAVEWESNGQPENNYK |
| | | | TTPPVLDSDGSFFLYSKLTVDKSRWQQGNVFSCSVMHEALHNHYTQ |
| | | | KSLSLSPGK |
| 1401. | CD19 97- | VH CDR1 | SYGMH |
| | G1RE-C2 CC x | | |
| | I2C0-scFc | | |
| 1402. | CD19 97- | VH CDR2 | VISYEGSNKYYAESVKG |
| | G1RE-C2 CC x | | |
| | I2C0-scFc | | |
| 1403. | CD19 97- | VH CDR3 | DRGTIFGNYGLEV |
| | G1RE-C2 CC x | | |
| | I2C0-scFc | | |
| 1404. | CD19 97- | VL CDR1 | RSSQSLLHKNAFNYLD |
| | G1RE-C2 CC x | | |
| | I2C0-scFc | | |
| 1405. | CD19 97- | VL CDR2 | LGSNRAS |
| | G1RE-C2 CC x | | |
| | I2C0-scFc | | |
| 1406. | CD19 97- | VL CDR3 | MQALQTPFT |
| | G1RE-C2 CC x | | |
| | I2C0-scFc | | |
| 1407. | CD19 97- | VH | QVQLVESGGGVVQPGRSLRLSCAASGFTFSSYGMHWVRQAPGKCLE |
| | G1RE-C2 CC x | | WVAVISYEGSNKYYAESVKGRFTISRDNSKNTLYLQMNSLRDEDTAVY |
| | I2C0-scFc | | YCARDRGTIFGNYGLEVWGQGTTVTVSS |
| 1408. | CD19 97- | VL | DIVMTQSPLSLPVISGEPASISCRSSQSLLHKNAFNYLDWYLQKPGQSP |
| | G1RE-C2 CC x | | QLLIYLGSNRASGVPDRFSGSGSGTDFTLKISRVEAEDVGVYYCMQAL |
| | I2C0-scFc | | QTPFTFGCGTKVDIK |
| 1409. | CD19 97- | scFv | DIVMTQSPLSLPVISGEPASISCRSSQSLLHKNAFNYLDWYLQKPGQSP |
| | G1RE-C2 CC x | | QLLIYLGSNRASGVPDRFSGSGSGTDFTLKISRVEAEDVGVYYCMQAL |
| | I2C0-scFc | | QTPFTFGCGTKVDIKGGGGSGGGGSGGGGSQVQLVESGGGVVQPG |
| | | | RSLRLSCAASGFTFSSYGMHWVRQAPGKCLEWVAVISYEGSNKYYAE |
| | | | SVKGRFTISRDNSKNTLYLQMNSLRDEDTAVYYCARDRGTIFGNYGLE |
| | | | VWGQGTTVTVSS |
| 1410. | CD19 97- | bispecific | DIVMTQSPLSLPVISGEPASISCRSSQSLLHKNAFNYLDWYLQKPGQSP |
| | G1RE-C2 CC x | molecule | QLLIYLGSNRASGVPDRFSGSGSGTDFTLKISRVEAEDVGVYYCMQAL |
| | I2C0-scFc | | QTPFTFGCGTKVDIKGGGGSGGGGSGGGGSQVQLVESGGGVVQPG |
| | | | RSLRLSCAASGFTFSSYGMHWVRQAPGKCLEWVAVISYEGSNKYYAE |
| | | | SVKGRFTISRDNSKNTLYLQMNSLRDEDTAVYYCARDRGTIFGNYGLE |
| | | | VWGQGTTVTVSSGGGGSEVQLVESGGGLVQPGGSLKLSCAASGFTF |
| | | | NKYAMNWVRQAPGKGLEWVARIRSKYNNYATYYADSVKDRFTISRD |
| | | | DSKNTAYLQMNNLKTEDTAVYYCVRHGNFGNSYISYWAYWGQGTL |
| | | | VTVSSGGGGSGGGGSGGGGSQTVVTQEPSLTVSPGGTVTLTCGSST |
| | | | GAVTSGNYPNWVQQKPGQAPRGLIGGTKFLAPGTPARFSGSLLGGK |
| | | | AALTLSGVQPEDEAEYYCVLWYSNRWVFGGGTKLTVL |
| 1411. | CD19 97- | bispecific | DIVMTQSPLSLPVISGEPASISCRSSQSLLHKNAFNYLDWYLQKPGQSP |
| | G1RE-C2 CC x | HLE | QLLIYLGSNRASGVPDRFSGSGSGTDFTLKISRVEAEDVGVYYCMQAL |
| | I2C0-scFc | molecule | QTPFTFGCGTKVDIKGGGGSGGGGSGGGGSQVQLVESGGGVVQPG |
| | | | RSLRLSCAASGFTFSSYGMHWVRQAPGKCLEWVAVISYEGSNKYYAE |
| | | | SVKGRFTISRDNSKNTLYLQMNSLRDEDTAVYYCARDRGTIFGNYGLE |
| | | | VWGQGTTVTVSSGGGGSEVQLVESGGGLVQPGGSLKLSCAASGFTF |
| | | | NKYAMNWVRQAPGKGLEWVARIRSKYNNYATYYADSVKDRFTISRD |
| | | | DSKNTAYLQMNNLKTEDTAVYYCVRHGNFGNSYISYWAYWGQGTL |
| | | | VTVSSGGGGSGGGGSGGGGSQTVVTQEPSLTVSPGGTVTLTCGSST |
| | | | GAVTSGNYPNWVQQKPGQAPRGLIGGTKFLAPGTPARFSGSLLGGK |
| | | | AALTLSGVQPEDEAEYYCVLWYSNRWVFGGGTKLTVLGGGGDKTHT |
| | | | CPPCPAPELLGGPSVFLFPPKPKDTLMISRTPEVTCVVVDVSHEDPEVK |
| | | | FNWYVDGVEVHNAKTKPCEEQYGSTYRCVSVLTVLHQDWLNGKEYK |
| | | | CKVSNKALPAPIEKTISKAKGQPREPQVYTLPPSREEMTKNQVSLTCLV |
| | | | KGFYPSDIAVEWESNGQPENNYKTTPPVLDSDGSFFLYSKLTVDKSR |
| | | | WQQGNVFSCSVMHEALHNHYTQKSLSLSPGKGGGGSGGGGSGGG |
| | | | GSGGGGSGGGGSGGGGSDKTHTCPPCPAPELLGGPSVFLFPPKPKDT |
| | | | LMISRTPEVTCVVVDVSHEDPEVKFNWYVDGVEVHNAKTKPCEEQY |
| | | | GSTYRCVSVLTVLHQDWLNGKEYKCKVSNKALPAPIEKTISKAKGQPR |
| | | | EPQVYTLPPSREEMTKNQVSLTCLVKGFYPSDIAVEWESNGQPENNY |
| | | | KTTPPVLDSDGSFFLYSKLTVDKSRWQQGNVFSCSVMHEALHNHYT |
| | | | QKSLSLSPGK |
| 1412. | CD19 97- | bispecific | DIVMTQSPLSLPVISGEPASISCRSSQSLLHKNAFNYLDWYLQKPGQSP |
| | G1RE-C2 CC x | HLE | QLLIYLGSNRASGVPDRFSGSGSGTDFTLKISRVEAEDVGVYYCMQAL |
| | I2C0- | molecule | QTPFTFGCGTKVDIKGGGGSGGGGSGGGGSQVQLVESGGGVVQPG |
| | scFc_delGK | | RSLRLSCAASGFTFSSYGMHWVRQAPGKCLEWVAVISYEGSNKYYAE |
| | | | SVKGRFTISRDNSKNTLYLQMNSLRDEDTAVYYCARDRGTIFGNYGLE |
| | | | VWGQGTTVTVSSGGGGSEVQLVESGGGLVQPGGSLKLSCAASGFTF |
| | | | NKYAMNWVRQAPGKGLEWVARIRSKYNNYATYYADSVKDRFTISRD |
| | | | DSKNTAYLQMNNLKTEDTAVYYCVRHGNFGNSYISYWAYWGQGTL |
| | | | VTVSSGGGGSGGGGSGGGGSQTVVTQEPSLTVSPGGTVTLTCGSST |
| | | | GAVTSGNYPNWVQQKPGQAPRGLIGGTKFLAPGTPARFSGSLLGGK |
| | | | AALTLSGVQPEDEAEYYCVLWYSNRWVFGGGTKLTVLGGGGDKTHT |
| | | | CPPCPAPELLGGPSVFLFPPKPKDTLMISRTPEVTCVVVDVSHEDPEVK |
| | | | FNWYVDGVEVHNAKTKPCEEQYGSTYRCVSVLTVLHQDWLNGKEYK |
| | | | CKVSNKALPAPIEKTISKAKGQPREPQVYTLPPSREEMTKNQVSLTCLV |
| | | | KGFYPSDIAVEWESNGQPENNYKTTPPVLDSDGSFFLYSKLTVDKSR |
| | | | WQQGNVFSCSVMHEALHNHYTQKSLSLSPGGGGSGGGGSGGGGS |
| | | | GGGGSGGGGSGGGGSDKTHTCPPCPAPELLGGPSVFLFPPKPKDTL |
| | | | MISRTPEVTCVVVDVSHEDPEVKFNWYVDGVEVHNAKTKPCEEQYG |
| | | | STYRCVSVLTVLHQDWLNGKEYKCKVSNKALPAPIEKTISKAKGQPRE |
| | | | PQVYTLPPSREEMTKNQVSLTCLVKGFYPSDIAVEWESNGQPENNYK |
| | | | TTPPVLDSDGSFFLYSKLTVDKSRWQQGNVFSCSVMHEALHNHYTQ |
| | | | KSLSLSPGK |
| 1413. | CD19 97- | VH CDR1 | SYGMH |
| | G1RE-B5 CC | | |
| | xI2C0-scFc | | |
| 1414. | CD19 97- | VH CDR2 | VISYEGSNKYYAESVKG |
| | G1RE-B5 CC | | |
| | xI2C0-scFc | | |
| 1415. | CD19 97- | VH CDR3 | DRGTIFGNYGLEV |
| | G1RE-B5 CC | | |
| | xI2C0-scFc | | |
| 1416. | CD19 97- | VL CDR1 | RSSQSLLHKNKWNYLD |
| | G1RE-B5 CC | | |
| | xI2C0-scFc | | |
| 1417. | CD19 97- | VL CDR2 | LGSNRAS |
| | G1RE-B5 CC | | |
| | xI2C0-scFc | | |
| 1418. | CD19 97- | VL CDR3 | MQALQTPFT |
| | G1RE-B5 CC | | |
| | xI2C0-scFc | | |
| 1419. | CD19 97- | VH | QVQLVESGGGVVQPGRSLRLSCAASGFTFSSYGMHWVRQAPGKCLE |
| | G1RE-B5 CC | | WVAVISYEGSNKYYAESVKGRFTISRDNSKNTLYLQMNSLRDEDTAVY |
| | xI2C0-scFc | | YCARDRGTIFGNYGLEVWGQGTTVTVSS |
| 1420. | CD19 97- | VL | DIVMTQSPLSLPVISGEPASISCRSSQSLLHKNKWNYLDWYLQKPGQS |
| | G1RE-B5 CC | | PQLLIYLGSNRASGVPDRFSGSGSGTDFTLKISRVEAEDVGVYYCMQA |
| | xI2C0-scFc | | LQTPFTFGCGTKVDIK |
| 1421. | CD19 97- | scFv | DIVMTQSPLSLPVISGEPASISCRSSQSLLHKNKWNYLDWYLQKPGQS |
| | G1RE-B5 CC | | PQLLIYLGSNRASGVPDRFSGSGSGTDFTLKISRVEAEDVGVYYCMQA |
| | xI2C0-scFc | | LQTPFTFGCGTKVDIKGGGGSGGGGSGGGGSQVQLVESGGGVVQP |
| | | | GRSLRLSCAASGFTFSSYGMHWVRQAPGKCLEWVAVISYEGSNKYYA |
| | | | ESVKGRFTISRDNSKNTLYLQMNSLRDEDTAVYYCARDRGTIFGNYGL |
| | | | EVWGQGTTVTVSS |
| 1422. | CD19 97- | bispecific | DIVMTQSPLSLPVISGEPASISCRSSQSLLHKNKWNYLDWYLQKPGQS |
| | G1RE-B5 CC | molecule | PQLLIYLGSNRASGVPDRFSGSGSGTDFTLKISRVEAEDVGVYYCMQA |
| | xI2C0-scFc | | LQTPFTFGCGTKVDIKGGGGSGGGGSGGGGSQVQLVESGGGVVQP |
| | | | GRSLRLSCAASGFTFSSYGMHWVRQAPGKCLEWVAVISYEGSNKYYA |
| | | | ESVKGRFTISRDNSKNTLYLQMNSLRDEDTAVYYCARDRGTIFGNYGL |
| | | | EVWGQGTTVTVSSGGGGSEVQLVESGGGLVQPGGSLKLSCAASGFT |
| | | | FNKYAMNWVRQAPGKGLEWVARIRSKYNNYATYYADSVKDRFTISR |
| | | | DDSKNTAYLQMNNLKTEDTAVYYCVRHGNFGNSYISYWAYWGQGT |
| | | | LVTVSSGGGGSGGGGSGGGGSQTVVTQEPSLTVSPGGTVTLTCGSST |
| | | | GAVTSGNYPNWVQQKPGQAPRGLIGGTKFLAPGTPARFSGSLLGGK |
| | | | AALTLSGVQPEDEAEYYCVLWYSNRWVFGGGTKLTVL |
| 1423. | CD19 97- | bispecific | DIVMTQSPLSLPVISGEPASISCRSSQSLLHKNKWNYLDWYLQKPGQS |
| | G1RE-135 CC | HLE | PQLLIYLGSNRASGVPDRFSGSGSGTDFTLKISRVEAEDVGVYYCMQA |
| | xI2C0-scFc | molecule | LQTPFTFGCGTKVDIKGGGGSGGGGSGGGGSQVQLVESGGGVVQP |
| | | | GRSLRLSCAASGFTFSSYGMHWVRQAPGKCLEWVAVISYEGSNKYYA |
| | | | ESVKGRFTISRDNSKNTLYLQMNSLRDEDTAVYYCARDRGTIFGNYGL |
| | | | EVWGQGTTVTVSSGGGGSEVQLVESGGGLVQPGGSLKLSCAASGFT |
| | | | FNKYAMNWVRQAPGKGLEWVARIRSKYNNYATYYADSVKDRFTISR |
| | | | DDSKNTAYLQMNNLKTEDTAVYYCVRHGNFGNSYISYWAYWGQGT |
| | | | LVTVSSGGGGSGGGGSGGGGSQTVVTQEPSLTVSPGGTVTLTCGSST |
| | | | GAVTSGNYPNWVQQKPGQAPRGLIGGTKFLAPGTPARFSGSLLGGK |
| | | | AALTLSGVQPEDEAEYYCVLWYSNRWVFGGGTKLTVLGGGGDKTHT |
| | | | CPPCPAPELLGGPSVFLFPPKPKDTLMISRTPEVTCVVVDVSHEDPEVK |
| | | | FNWYVDGVEVHNAKTKPCEEQYGSTYRCVSVLTVLHQDWLNGKEYK |
| | | | CKVSNKALPAPIEKTISKAKGQPREPQVYTLPPSREEMTKNQVSLTCLV |
| | | | KGFYPSDIAVEWESNGQPENNYKTTPPVLDSDGSFFLYSKLTVDKSR |
| | | | WQQGNVFSCSVMHEALHNHYTQKSLSLSPGKGGGGSGGGGSGGG |
| | | | GSGGGGSGGGGSGGGGSDKTHTCPPCPAPELLGGPSVFLFPPKPKDT |
| | | | LMISRTPEVTCVVVDVSHEDPEVKFNWYVDGVEVHNAKTKPCEEQY |
| | | | GSTYRCVSVLTVLHQDWLNGKEYKCKVSNKALPAPIEKTISKAKGQPR |
| | | | EPQVYTLPPSREEMTKNQVSLTCLVKGFYPSDIAVEWESNGQPENNY |
| | | | KTTPPVLDSDGSFFLYSKLTVDKSRWQQGNVFSCSVMHEALHNHYT |
| | | | QKSLSLSPGK |
| 1424. | CD19 97- | bispecific | DIVMTQSPLSLPVISGEPASISCRSSQSLLHKNKWNYLDWYLQKPGQS |
| | G1RE-135 CC | HLE | PQLLIYLGSNRASGVPDRFSGSGSGTDFTLKISRVEAEDVGVYYCMQA |
| | xI2C0- | molecule | LQTPFTFGCGTKVDIKGGGGSGGGGSGGGGSQVQLVESGGGVVQP |
| | scFc_delGK | | GRSLRLSCAASGFTFSSYGMHWVRQAPGKCLEWVAVISYEGSNKYYA |
| | | | ESVKGRFTISRDNSKNTLYLQMNSLRDEDTAVYYCARDRGTIFGNYGL |
| | | | EVWGQGTTVTVSSGGGGSEVQLVESGGGLVQPGGSLKLSCAASGFT |
| | | | FNKYAMNWVRQAPGKGLEWVARIRSKYNNYATYYADSVKDRFTISR |
| | | | DDSKNTAYLQMNNLKTEDTAVYYCVRHGNFGNSYISYWAYWGQGT |
| | | | LVTVSSGGGGSGGGGSGGGGSQTVVTQEPSLTVSPGGTVTLTCGSST |
| | | | GAVTSGNYPNWVQQKPGQAPRGLIGGTKFLAPGTPARFSGSLLGGK |
| | | | AALTLSGVQPEDEAEYYCVLWYSNRWVFGGGTKLTVLGGGGDKTHT |
| | | | CPPCPAPELLGGPSVFLFPPKPKDTLMISRTPEVTCVVVDVSHEDPEVK |
| | | | FNWYVDGVEVHNAKTKPCEEQYGSTYRCVSVLTVLHQDWLNGKEYK |
| | | | CKVSNKALPAPIEKTISKAKGQPREPQVYTLPPSREEMTKNQVSLTCLV |
| | | | KGFYPSDIAVEWESNGQPENNYKTTPPVLDSDGSFFLYSKLTVDKSR |
| | | | WQQGNVFSCSVMHEALHNHYTQKSLSLSPGGGGSGGGGSGGGGS |
| | | | GGGGSGGGGSGGGGSDKTHTCPPCPAPELLGGPSVFLFPPKPKDTL |
| | | | MISRTPEVTCVVVDVSHEDPEVKFNWYVDGVEVHNAKTKPCEEQYG |
| | | | STYRCVSVLTVLHQDWLNGKEYKCKVSNKALPAPIEKTISKAKGQPRE |
| | | | PQVYTLPPSREEMTKNQVSLTCLVKGFYPSDIAVEWESNGQPENNYK |
| | | | TTPPVLDSDGSFFLYSKLTVDKSRWQQGNVFSCSVMHEALHNHYTQ |
| | | | KSLSLSPGK |
| 1425. | CD19 97- | VH CDR1 | SYGMH |
| | G1RE-1310 CC | | |
| | xI2C0-scFc | | |
| 1426. | CD19 97- | VH CDR2 | VISYEGSNKYYAESVKG |
| | G1RE-1310 CC | | |
| | xI2C0-scFc | | |
| 1427. | CD19 97- | VH CDR3 | DRGTIFGNYGLEV |
| | G1RE-B10 CC | | |
| | xI2C0-scFc | | |
| 1428. | CD19 97- | VL CDR1 | RSSQSLLHKNNFNYLD |
| | G1RE-B10 CC | | |
| | xI2C0-scFc | | |
| 1429. | CD19 97- | VL CDR2 | LGSNRAS |
| | G1RE-B10 CC | | |
| | xI2C0-scFc | | |
| 1430. | CD19 97- | VL CDR3 | MQALQTPFT |
| | G1RE-B10 CC | | |
| | xI2C0-scFc | | |
| 1431. | CD19 97- | VH | QVQLVESGGGVVQPGRSLRLSCAASGFTFSSYGMHWVRQAPGKCLE |
| | G1RE-B10 CC | | WVAVISYEGSNKYYAESVKGRFTISRDNSKNTLYLQMNSLRDEDTAVY |
| | xI2C0-scFc | | YCARDRGTIFGNYGLEVWGQGTTVTVSS |
| 1432. | CD19 97- | VL | DIVMTQSPLSLPVISGEPASISCRSSQSLLHKNNFNYLDWYLQKPGQSP |
| | G1RE-B10 CC | | QLLIYLGSNRASGVPDRFSGSGSGTDFTLKISRVEAEDVGVYYCMQAL |
| | xI2C0-scFc | | QTPFTFGCGTKVDIK |
| 1433. | CD19 97- | scFv | DIVMTQSPLSLPVISGEPASISCRSSQSLLHKNNFNYLDWYLQKPGQSP |
| | G1RE-B10 CC | | QLLIYLGSNRASGVPDRFSGSGSGTDFTLKISRVEAEDVGVYYCMQAL |
| | xI2C0-scFc | | QTPFTFGCGTKVDIKGGGGSGGGGSGGGGSQVQLVESGGGVVQPG |
| | | | RSLRLSCAASGFTFSSYGMHWVRQAPGKCLEWVAVISYEGSNKYYAE |
| | | | SVKGRFTISRDNSKNTLYLQMNSLRDEDTAVYYCARDRGTIFGNYGLE |
| | | | VWGQGTTVTVSS |
| 1434. | CD19 97- | bispecific | DIVMTQSPLSLPVISGEPASISCRSSQSLLHKNNFNYLDWYLQKPGQSP |
| | G1RE-B10 CC | molecule | QLLIYLGSNRASGVPDRFSGSGSGTDFTLKISRVEAEDVGVYYCMQAL |
| | xI2C0-scFc | | QTPFTFGCGTKVDIKGGGGSGGGGSGGGGSQVQLVESGGGVVQPG |
| | | | RSLRLSCAASGFTFSSYGMHWVRQAPGKCLEWVAVISYEGSNKYYAE |
| | | | SVKGRFTISRDNSKNTLYLQMNSLRDEDTAVYYCARDRGTIFGNYGLE |
| | | | VWGQGTTVTVSSGGGGSEVQLVESGGGLVQPGGSLKLSCAASGFTF |
| | | | NKYAMNWVRQAPGKGLEWVARIRSKYNNYATYYADSVKDRFTISRD |
| | | | DSKNTAYLQMNNLKTEDTAVYYCVRHGNFGNSYISYWAYWGQGTL |
| | | | VTVSSGGGGSGGGGSGGGGSQTVVTQEPSLTVSPGGTVTLTCGSST |
| | | | GAVTSGNYPNWVQQKPGQAPRGLIGGTKFLAPGTPARFSGSLLGGK |
| | | | AALTLSGVQPEDEAEYYCVLWYSNRWVFGGGTKLTVL |
| 1435. | CD19 97- | bispecific | DIVMTQSPLSLPVISGEPASISCRSSQSLLHKNNFNYLDWYLQKPGQSP |
| | G1RE-B10 CC | HLE | QLLIYLGSNRASGVPDRFSGSGSGTDFTLKISRVEAEDVGVYYCMQAL |
| | xI2C0-scFc | molecule | QTPFTFGCGTKVDIKGGGGSGGGGSGGGGSQVQLVESGGGVVQPG |
| | | | RSLRLSCAASGFTFSSYGMHWVRQAPGKCLEWVAVISYEGSNKYYAE |
| | | | SVKGRFTISRDNSKNTLYLQMNSLRDEDTAVYYCARDRGTIFGNYGLE |
| | | | VWGQGTTVTVSSGGGGSEVQLVESGGGLVQPGGSLKLSCAASGFTF |
| | | | NKYAMNWVRQAPGKGLEWVARIRSKYNNYATYYADSVKDRFTISRD |
| | | | DSKNTAYLQMNNLKTEDTAVYYCVRHGNFGNSYISYWAYWGQGTL |
| | | | VTVSSGGGGSGGGGSGGGGSQTVVTQEPSLTVSPGGTVTLTCGSST |
| | | | GAVTSGNYPNWVQQKPGQAPRGLIGGTKFLAPGTPARFSGSLLGGK |
| | | | AALTLSGVQPEDEAEYYCVLWYSNRWVFGGGTKLTVLGGGGDKTHT |
| | | | CPPCPAPELLGGPSVFLFPPKPKDTLMISRTPEVTCVVVDVSHEDPEVK |
| | | | FNWYVDGVEVHNAKTKPCEEQYGSTYRCVSVLTVLHQDWLNGKEYK |
| | | | CKVSNKALPAPIEKTISKAKGQPREPQVYTLPPSREEMTKNQVSLTCLV |
| | | | KGFYPSDIAVEWESNGQPENNYKTTPPVLDSDGSFFLYSKLTVDKSR |
| | | | WQQGNVFSCSVMHEALHNHYTQKSLSLSPGKGGGGSGGGGSGGG |
| | | | GSGGGGSGGGGSGGGGSDKTHTCPPCPAPELLGGPSVFLFPPKPKDT |
| | | | LMISRTPEVTCVVVDVSHEDPEVKFNWYVDGVEVHNAKTKPCEEQY |
| | | | GSTYRCVSVLTVLHQDWLNGKEYKCKVSNKALPAPIEKTISKAKGQPR |
| | | | EPQVYTLPPSREEMTKNQVSLTCLVKGFYPSDIAVEWESNGQPENNY |
| | | | KTTPPVLDSDGSFFLYSKLTVDKSRWQQGNVFSCSVMHEALHNHYT |
| | | | QKSLSLSPGK |
| 1436. | CD19 97- | bispecific | DIVMTQSPLSLPVISGEPASISCRSSQSLLHKNNFNYLDWYLQKPGQSP |
| | G1RE-B10 CC | HLE | QLLIYLGSNRASGVPDRFSGSGSGTDFTLKISRVEAEDVGVYYCMQAL |
| | xI2C0- | molecule | QTPFTFGCGTKVDIKGGGGSGGGGSGGGGSQVQLVESGGGVVQPG |
| | scFc_delGK | | RSLRLSCAASGFTFSSYGMHWVRQAPGKCLEWVAVISYEGSNKYYAE |
| | | | SVKGRFTISRDNSKNTLYLQMNSLRDEDTAVYYCARDRGTIFGNYGLE |
| | | | VWGQGTTVTVSSGGGGSEVQLVESGGGLVQPGGSLKLSCAASGFTF |
| | | | NKYAMNWVRQAPGKGLEWVARIRSKYNNYATYYADSVKDRFTISRD |
| | | | DSKNTAYLQMNNLKTEDTAVYYCVRHGNFGNSYISYWAYWGQGTL |
| | | | VTVSSGGGGSGGGGSGGGGSQTVVTQEPSLTVSPGGTVTLTCGSST |
| | | | GAVTSGNYPNWVQQKPGQAPRGLIGGTKFLAPGTPARFSGSLLGGK |
| | | | AALTLSGVQPEDEAEYYCVLWYSNRWVFGGGTKLTVLGGGGDKTHT |
| | | | CPPCPAPELLGGPSVFLFPPKPKDTLMISRTPEVTCVVVDVSHEDPEVK |
| | | | FNWYVDGVEVHNAKTKPCEEQYGSTYRCVSVLTVLHQDWLNGKEYK |
| | | | CKVSNKALPAPIEKTISKAKGQPREPQVYTLPPSREEMTKNQVSLTCLV |
| | | | KGFYPSDIAVEWESNGQPENNYKTTPPVLDSDGSFFLYSKLTVDKSR |
| | | | WQQGNVFSCSVMHEALHNHYTQKSLSLSPGGGGSGGGGSGGGGS |
| | | | GGGGSGGGGSGGGGSDKTHTCPPCPAPELLGGPSVFLFPPKPKDTL |
| | | | MISRTPEVTCVVVDVSHEDPEVKFNWYVDGVEVHNAKTKPCEEQYG |
| | | | STYRCVSVLTVLHQDWLNGKEYKCKVSNKALPAPIEKTISKAKGQPRE |
| | | | PQVYTLPPSREEMTKNQVSLTCLVKGFYPSDIAVEWESNGQPENNYK |
| | | | TTPPVLDSDGSFFLYSKLTVDKSRWQQGNVFSCSVMHEALHNHYTQ |
| | | | KSLSLSPGK |
| 1437. | CD19 1-C3- | VH CDR1 | NYGMH |
| | B10 CC x | | |
| | I2C0-scFc | | |
| 1438. | CD19 1-C3- | VH CDR2 | AIGWEGSNKYYAEPVKG |
| | B10 CC x | | |
| | I2C0-scFc | | |
| 1439. | CD19 1-C3- | VH CDR3 | DRGTIFGYYGMDV |
| | B10 CC x | | |
| | I2C0-scFc | | |
| 1440. | CD19 1-C3- | VL CDR1 | RSSQSLLHKNNFNYLD |
| | B10 CC x | | |
| | I2C0-scFc | | |
| 1441. | CD19 1-C3- | VL CDR2 | LGSNRAS |
| | B10 CC x | | |
| | I2C0-scFc | | |
| 1442. | CD19 1-C3- | VL CDR3 | MQALSEPLT |
| | B10 CC x | | |
| | I2C0-scFc | | |
| 1443. | CD19 1-C3- | VH | QVQLVESGGGVVQPGRSLRLSCEASGFIVSNYGMHWVRQAPGKCLE |
| | B10 CC x | | WVAAIGWEGSNKYYAEPVKGRFTISRDKSKNTLSLQMSSLRAEDTAL |
| | I2C0-scFc | | YYCARDRGTIFGYYGMDVWGQGTTVTVSS |
| 1444. | CD19 1-C3- | VL | DIVMTQSPLSLPVTPGEPASISCRSSQSLLHKNNFNYLDWYLQKPGQS |
| | B10 CC x | | PQLLIYLGSNRASGVPDRFSGSGSGTDFTLKISRVEAEDVGVYYCMQA |
| | I2C0-scFc | | LSEPLTFACGTKVEIK |
| 1445. | CD19 1-C3- | scFv | DIVMTQSPLSLPVTPGEPASISCRSSQSLLHKNNFNYLDWYLQKPGQS |
| | B10 CC x | | PQLLIYLGSNRASGVPDRFSGSGSGTDFTLKISRVEAEDVGVYYCMQA |
| | I2C0-scFc | | LSEPLTFACGTKVEIKGGGGSGGGGSGGGGSQVQLVESGGGVVQPG |
| | | | RSLRLSCEASGFIVSNYGMHWVRQAPGKCLEWVAAIGWEGSNKYYA |
| | | | EPVKGRFTISRDKSKNTLSLQMSSLRAEDTALYYCARDRGTIFGYYGM |
| | | | DVWGQGTTVTVSS |
| 1446. | CD19 1-C3- | bispecific | DIVMTQSPLSLPVTPGEPASISCRSSQSLLHKNNFNYLDWYLQKPGQS |
| | B10 CC x | molecule | PQLLIYLGSNRASGVPDRFSGSGSGTDFTLKISRVEAEDVGVYYCMQA |
| | I2C0-scFc | | LSEPLTFACGTKVEIKGGGGSGGGGSGGGGSQVQLVESGGGVVQPG |
| | | | RSLRLSCEASGFIVSNYGMHWVRQAPGKCLEWVAAIGWEGSNKYYA |
| | | | EPVKGRFTISRDKSKNTLSLQMSSLRAEDTALYYCARDRGTIFGYYGM |
| | | | DVWGQGTTVTVSSGGGGSEVQLVESGGGLVQPGGSLKLSCAASGFT |
| | | | FNKYAMNWVRQAPGKGLEWVARIRSKYNNYATYYADSVKDRFTISR |
| | | | DDSKNTAYLQMNNLKTEDTAVYYCVRHGNFGNSYISYWAYWGQGT |
| | | | LVTVSSGGGGSGGGGSGGGGSQTVVTQEPSLTVSPGGTVTLTCGSST |
| | | | GAVTSGNYPNWVQQKPGQAPRGLIGGTKFLAPGTPARFSGSLLGGK |
| | | | AALTLSGVQPEDEAEYYCVLWYSNRWVFGGGTKLTVL |
| 1447. | CD19 1-C3- | bispecific | DIVMTQSPLSLPVTPGEPASISCRSSQSLLHKNNFNYLDWYLQKPGQS |
| | B10 CC x | HLE | PQLLIYLGSNRASGVPDRFSGSGSGTDFTLKISRVEAEDVGVYYCMQA |
| | I2C0-scFc | molecule | LSEPLTFACGTKVEIKGGGGSGGGGSGGGGSQVQLVESGGGVVQPG |
| | | | RSLRLSCEASGFIVSNYGMHWVRQAPGKCLEWVAAIGWEGSNKYYA |
| | | | EPVKGRFTISRDKSKNTLSLQMSSLRAEDTALYYCARDRGTIFGYYGM |
| | | | DVWGQGTTVTVSSGGGGSEVQLVESGGGLVQPGGSLKLSCAASGFT |
| | | | FNKYAMNWVRQAPGKGLEWVARIRSKYNNYATYYADSVKDRFTISR |
| | | | DDSKNTAYLQMNNLKTEDTAVYYCVRHGNFGNSYISYWAYWGQGT |
| | | | LVTVSSGGGGSGGGGSGGGGSQTVVTQEPSLTVSPGGTVTLTCGSST |
| | | | GAVTSGNYPNWVQQKPGQAPRGLIGGTKFLAPGTPARFSGSLLGGK |
| | | | AALTLSGVQPEDEAEYYCVLWYSNRWVFGGGTKLTVLGGGGDKTHT |
| | | | CPPCPAPELLGGPSVFLFPPKPKDTLMISRTPEVTCVVVDVSHEDPEVK |
| | | | FNWYVDGVEVHNAKTKPCEEQYGSTYRCVSVLTVLHQDWLNGKEYK |
| | | | CKVSNKALPAPIEKTISKAKGQPREPQVYTLPPSREEMTKNQVSLTCLV |
| | | | KGFYPSDIAVEWESNGQPENNYKTTPPVLDSDGSFFLYSKLTVDKSR |
| | | | WQQGNVFSCSVMHEALHNHYTQKSLSLSPGKGGGGSGGGGSGGG |
| | | | GSGGGGSGGGGSGGGGSDKTHTCPPCPAPELLGGPSVFLFPPKPKDT |
| | | | LMISRTPEVTCVVVDVSHEDPEVKFNWYVDGVEVHNAKTKPCEEQY |
| | | | GSTYRCVSVLTVLHQDWLNGKEYKCKVSNKALPAPIEKTISKAKGQPR |
| | | | EPQVYTLPPSREEMTKNQVSLTCLVKGFYPSDIAVEWESNGQPENNY |
| | | | KTTPPVLDSDGSFFLYSKLTVDKSRWQQGNVFSCSVMHEALHNHYT |
| | | | QKSLSLSPGK |
| 1448. | CD19 1-C3- | bispecific | DIVMTQSPLSLPVTPGEPASISCRSSQSLLHKNNFNYLDWYLQKPGQS |
| | B10 CC x | HLE | PQLLIYLGSNRASGVPDRFSGSGSGTDFTLKISRVEAEDVGVYYCMQA |
| | I2C0- | molecule | LSEPLTFACGTKVEIKGGGGSGGGGSGGGGSQVQLVESGGGVVQPG |
| | scFc_delGK | | RSLRLSCEASGFIVSNYGMHWVRQAPGKCLEWVAAIGWEGSNKYYA |
| | | | EPVKGRFTISRDKSKNTLSLQMSSLRAEDTALYYCARDRGTIFGYYGM |
| | | | DVWGQGTTVTVSSGGGGSEVQLVESGGGLVQPGGSLKLSCAASGFT |
| | | | FNKYAMNWVRQAPGKGLEWVARIRSKYNNYATYYADSVKDRFTISR |
| | | | DDSKNTAYLQMNNLKTEDTAVYYCVRHGNFGNSYISYWAYWGQGT |
| | | | LVTVSSGGGGSGGGGSGGGGSQTVVTQEPSLTVSPGGTVTLTCGSST |
| | | | GAVTSGNYPNWVQQKPGQAPRGLIGGTKFLAPGTPARFSGSLLGGK |
| | | | AALTLSGVQPEDEAEYYCVLWYSNRWVFGGGTKLTVLGGGGDKTHT |
| | | | CPPCPAPELLGGPSVFLFPPKPKDTLMISRTPEVTCVVVDVSHEDPEVK |
| | | | FNWYVDGVEVHNAKTKPCEEQYGSTYRCVSVLTVLHQDWLNGKEYK |
| | | | CKVSNKALPAPIEKTISKAKGQPREPQVYTLPPSREEMTKNQVSLTCLV |
| | | | KGFYPSDIAVEWESNGQPENNYKTTPPVLDSDGSFFLYSKLTVDKSR |
| | | | WQQGNVFSCSVMHEALHNHYTQKSLSLSPGGGGSGGGGSGGGGS |
| | | | GGGGSGGGGSGGGGSDKTHTCPPCPAPELLGGPSVFLFPPKPKDTL |
| | | | MISRTPEVTCVVVDVSHEDPEVKFNWYVDGVEVHNAKTKPCEEQYG |
| | | | STYRCVSVLTVLHQDWLNGKEYKCKVSNKALPAPIEKTISKAKGQPRE |
| | | | PQVYTLPPSREEMTKNQVSLTCLVKGFYPSDIAVEWESNGQPENNYK |
| | | | TTPPVLDSDGSFFLYSKLTVDKSRWQQGNVFSCSVMHEALHNHYTQ |
| | | | KSLSLSPGK |
| 1449. | IgG1 hinge | | DKTHTCPPCP |
| 1450. | IgG2 hinge | | ERKCCVECPPCP |
| 1451. | IgG3 hinge | | ELKTPLDTTHTCPRCP |
| 1452. | IgG4 hinge | | ESKYGPPCPSCP |
| 1453. | EGFRvIIIccxI2 | bispecific | QVQLVESGGGVVQSGRSLRLSCAASGFTFRNYGMHWVRQAPGKCL |
| | C-Hinge-CH2- | HLE | EWVAVIWYDGSDKYYADSVRGRFTISRDNSKNTLYLQMNSLRAEDTA |
| | CH3-linker- | molecule | VYYCARDGYDILTGNPRDFDYWGQGTLVTVSSGGGGSGGGGSGGG |
| | hinge-CH2- | | GSDTVMTQTPLSSHVTLGQPASISCRSSQSLVHSDGNTYLSWLQQRP |
| | CH3 | | GQPPRLLIYRISRRFSGVPDRFSGSGAGTDFTLEISRVEAEDVGVYYCM |
| | (DF9) | | QSTHVPRTFGCGTKVEIKSGGGGSEVQLVESGGGLVQPGGSLKLSCA |
| | | | ASGFTFNKYAMNWVRQAPGKGLEWVARIRSKYNNYATYYADSVKD |
| | | | RFTISRDDSKNTAYLQMNNLKTEDTAVYYCVRHGNFGNSYISYWAY |
| | | | WGQGTLVTVSSGGGGSGGGGSGGGGSQTVVTQEPSLTVSPGGTVT |
| | | | LTCGSSTGAVTSGNYPNWVQQKPGQAPRGLIGGTKFLAPGTPARFS |
| | | | GSLLGGKAALTLSGVQPEDEAEYYCVLWYSNRWVFGGGTKLTVLGG |
| | | | GGDKTHTCPPCPAPELLGGPSVFLFPPKPKDTLMISRTPEVTCVVVDV |
| | | | SHEDPEVKFNWYVDGVEVHNAKTKPCEEQYGSTYRCVSVLTVLHQD |
| | | | WLNGKEYKCKVSNKALPAPIEKTISKAKGQPREPQVYTLPPSREEMTK |
| | | | NQVSLTCLVKGFYPSDIAVEWESNGQPENNYKTTPPVLDSDGSFFLYS |
| | | | KLTVDKSRWQQGNVFSCSVMHEALHNHYTQKSLSLSPGKGGGGSG |
| | | | GGGSGGGGSGGGGSGGGGSGGGGSDKTHTCPPCPAPELLGGPSVF |
| | | | LFPPKPKDTLMISRTPEVTCVVVDVSHEDPEVKFNWYVDGVEVHNAK |
| | | | TKPCEEQYGSTYRCVSVLTVLHQDWLNGKEYKCKVSNKALPAPIEKTIS |
| | | | KAKGQPREPQVYTLPPSREEMTKNQVSLTCLVKGFYPSDIAVEWESN |
| | | | GQPENNYKTTPPVLDSDGSFFLYSKLTVDKSRWQQGNVFSCSVMHE |
| | | | ALHNHYTQKSLSLSPGK |
| 1454. | EGFRvIIIccxI2 | bispecific | QVQLVESGGGVVQSGRSLRLSCAASGFTFRNYGMHWVRQAPGKCL |
| | C-Hinge-CH2- | HLE | EWVAVIWYDGSDKYYADSVRGRFTISRDNSKNTLYLQMNSLRAEDTA |
| | CH3-linker- | molecule | VYYCARDGYDILTGNPRDFDYWGQGTLVTVSSGGGGSGGGGSGGG |
| | CH2-CH3 | | GSDTVMTQTPLSSHVTLGQPASISCRSSQSLVHSDGNTYLSWLQQRP |
| | (T2G) | | GQPPRLLIYRISRRFSGVPDRFSGSGAGTDFTLEISRVEAEDVGVYYCM |
| | | | QSTHVPRTFGCGTKVEIKSGGGGSEVQLVESGGGLVQPGGSLKLSCA |
| | | | ASGFTFNKYAMNWVRQAPGKGLEWVARIRSKYNNYATYYADSVKD |
| | | | RFTISRDDSKNTAYLQMNNLKTEDTAVYYCVRHGNFGNSYISYWAY |
| | | | WGQGTLVTVSSGGGGSGGGGSGGGGSQTVVTQEPSLTVSPGGTVT |
| | | | LTCGSSTGAVTSGNYPNWVQQKPGQAPRGLIGGTKFLAPGTPARFS |
| | | | GSLLGGKAALTLSGVQPEDEAEYYCVLWYSNRWVFGGGTKLTVLGG |
| | | | GGDKTHTCPPCPAPELLGGPSVFLFPPKPKDTLMISRTPEVTCVVVDV |
| | | | SHEDPEVKFNWYVDGVEVHNAKTKPCEEQYGSTYRCVSVLTVLHQD |
| | | | WLNGKEYKCKVSNKALPAPIEKTISKAKGQPREPQVYTLPPSREEMTK |
| | | | NQVSLTCLVKGFYPSDIAVEWESNGQPENNYKTTPPVLDSDGSFFLYS |
| | | | KLTVDKSRWQQGNVFSCSVMHEALHNHYTQKSLSLSPGKGGGGSG |
| | | | GGGSGGGGSGGGGSGGGGSGGGGSAPELLGGPSVFLFPPKPKDTL |
| | | | MISRTPEVTCVVVDVSHEDPEVKFNWYVDGVEVHNAKTKPCEEQYG |
| | | | STYRCVSVLTVLHQDWLNGKEYKCKVSNKALPAPIEKTISKAKGQPRE |
| | | | PQVYTLPPSREEMTKNQVSLTCLVKGFYPSDIAVEWESNGQPENNYK |
| | | | TTPPVLDSDGSFFLYSKLTVDKSRWQQGNVFSCSVMHEALHNHYTQ |
| | | | KSLSLSPGK |
| 1455. | EGFRvIIIccxI2 | bispecific | QVQLVESGGGVVQSGRSLRLSCAASGFTFRNYGMHWVRQAPGKCL |
| | C-Hinge- | HLE | EWVAVIWYDGSDKYYADSVRGRFTISRDNSKNTLYLQMNSLRAEDTA |
| | CH2-linker- | molecule | VYYCARDGYDILTGNPRDFDYWGQGTLVTVSSGGGGSGGGGSGGG |
| | Hinge-CH2- | | GSDTVMTQTPLSSHVTLGQPASISCRSSQSLVHSDGNTYLSWLQQRP |
| | CH3-linker- | | GQPPRLLIYRISRRFSGVPDRFSGSGAGTDFTLEISRVEAEDVGVYYCM |
| | CH3 | | QSTHVPRTFGCGTKVEIKSGGGGSEVQLVESGGGLVQPGGSLKLSCA |
| | (D3L) | | ASGFTFNKYAMNWVRQAPGKGLEWVARIRSKYNNYATYYADSVKD |
| | | | RFTISRDDSKNTAYLQMNNLKTEDTAVYYCVRHGNFGNSYISYWAY |
| | | | WGQGTLVTVSSGGGGSGGGGSGGGGSQTVVTQEPSLTVSPGGTVT |
| | | | LTCGSSTGAVTSGNYPNWVQQKPGQAPRGLIGGTKFLAPGTPARFS |
| | | | GSLLGGKAALTLSGVQPEDEAEYYCVLWYSNRWVFGGGTKLTVLGG |
| | | | GGDKTHTCPPCPAPELLGGPSVFLFPPKPKDTLMISRTPEVTCVVVDV |
| | | | SHEDPEVKFNWYVDGVEVHNAKTKPCEEQYGSTYRCVSVLTVLHQD |
| | | | WLNGKEYKCKVSNKALPAPIEKTISKAKGGGGSGGGGSGGGGSGGG |
| | | | GSDKTHTCPPCPAPELLGGPSVFLFPPKPKDTLMISRTPEVTCVVVDVS |
| | | | HEDPEVKFNWYVDGVEVHNAKTKPCEEQYGSTYRCVSVLTVLHQDW |
| | | | LNGKEYKCKVSNKALPAPIEKTISKAKGQPREPQVYTLPPSREEMTKN |
| | | | QVSLTCLVKGFYPSDIAVEWESNGQPENNYKTTPPVLDSDGSFFLYSK |
| | | | LTVDKSRWQQGNVFSCSVMHEALHNHYTQKSLSLSPGKGGGGSGG |
| | | | GGSGGGGSGGGGSGQPREPQVYTLPPSREEMTKNQVSLTCLVKGFY |
| | | | PSDIAVEWESNGQPENNYKTTPPVLDSDGSFFLYSKLTVDKSRWQQG |
| | | | NVFSCSVMHEALHNHYTQKSLSLSPGK |
| 1456. | EGFRvIIIccxI2 | bispecific | QVQLVESGGGVVQSGRSLRLSCAASGFTFRNYGMHWVRQAPGKCL |
| | C-Hinge- | HLE | EWVAVIWYDGSDKYYADSVRGRFTISRDNSKNTLYLQMNSLRAEDTA |
| | CH2-linker- | molecule | VYYCARDGYDILTGNPRDFDYWGQGTLVTVSSGGGGSGGGGSGGG |
| | CH2-CH3- | | GSDTVMTQTPLSSHVTLGQPASISCRSSQSLVHSDGNTYLSWLQQRP |
| | linker-CH3 | | GQPPRLLIYRISRRFSGVPDRFSGSGAGTDFTLEISRVEAEDVGVYYCM |
| | (T7I) | | QSTHVPRTFGCGTKVEIKSGGGGSEVQLVESGGGLVQPGGSLKLSCA |
| | | | ASGFTFNKYAMNWVRQAPGKGLEWVARIRSKYNNYATYYADSVKD |
| | | | RFTISRDDSKNTAYLQMNNLKTEDTAVYYCVRHGNFGNSYISYWAY |
| | | | WGQGTLVTVSSGGGGSGGGGSGGGGSQTVVTQEPSLTVSPGGTVT |
| | | | LTCGSSTGAVTSGNYPNWVQQKPGQAPRGLIGGTKFLAPGTPARFS |
| | | | GSLLGGKAALTLSGVQPEDEAEYYCVLWYSNRWVFGGGTKLTVLGG |
| | | | GGDKTHTCPPCPAPELLGGPSVFLFPPKPKDTLMISRTPEVTCVVVDV |
| | | | SHEDPEVKFNWYVDGVEVHNAKTKPCEEQYGSTYRCVSVLTVLHQD |
| | | | WLNGKEYKCKVSNKALPAPIEKTISKAKGGGGSGGGGSGGGGSGGG |
| | | | GSAPELLGGPSVFLFPPKPKDTLMISRTPEVTCVVVDVSHEDPEVKFN |
| | | | WYVDGVEVHNAKTKPCEEQYGSTYRCVSVLTVLHQDWLNGKEYKCK |
| | | | VSNKALPAPIEKTISKAKGQPREPQVYTLPPSREEMTKNQVSLTCLVKG |
| | | | FYPSDIAVEWESNGQPENNYKTTPPVLDSDGSFFLYSKLTVDKSRWQ |
| | | | QGNVFSCSVMHEALHNHYTQKSLSLSPGKGGGGSGGGGSGGGGSG |
| | | | GGGSGQPREPQVYTLPPSREEMTKNQVSLTCLVKGFYPSDIAVEWES |
| | | | NGQPENNYKTTPPVLDSDGSFFLYSKLTVDKSRWQQGNVFSCSVMH |
| | | | EALHNHYTQKSLSLSPGK |
| 1457. | EGFRvIIIccxI2 | bispecific | QVQLVESGGGVVQSGRSLRLSCAASGFTFRNYGMHWVRQAPGKCL |
| | C-CH2-linker- | HLE | EWVAVIWYDGSDKYYADSVRGRFTISRDNSKNTLYLQMNSLRAEDTA |
| | CH2-CH3- | molecule | VYYCARDGYDILTGNPRDFDYWGQGTLVTVSSGGGGSGGGGSGGG |
| | linker-CH3 | | GSDTVMTQTPLSSHVTLGQPASISCRSSQSLVHSDGNTYLSWLQQRP |
| | (K6C) | | GQPPRLLIYRISRRFSGVPDRFSGSGAGTDFTLEISRVEAEDVGVYYCM |
| | | | QSTHVPRTFGCGTKVEIKSGGGGSEVQLVESGGGLVQPGGSLKLSCA |
| | | | ASGFTFNKYAMNWVRQAPGKGLEWVARIRSKYNNYATYYADSVKD |
| | | | RFTISRDDSKNTAYLQMNNLKTEDTAVYYCVRHGNFGNSYISYWAY |
| | | | WGQGTLVTVSSGGGGSGGGGSGGGGSQTVVTQEPSLTVSPGGTVT |
| | | | LTCGSSTGAVTSGNYPNWVQQKPGQAPRGLIGGTKFLAPGTPARFS |
| | | | GSLLGGKAALTLSGVQPEDEAEYYCVLWYSNRWVFGGGTKLTVLGG |
| | | | GGAPELLGGPSVFLFPPKPKDTLMISRTPEVTCVVVDVSHEDPEVKFN |
| | | | WYVDGVEVHNAKTKPCEEQYGSTYRCVSVLTVLHQDWLNGKEYKCK |
| | | | VSNKALPAPIEKTISKAKGGGGSGGGGSGGGGSGGGGSAPELLGGPS |
| | | | VFLFPPKPKDTLMISRTPEVTCVVVDVSHEDPEVKFNWYVDGVEVHN |
| | | | AKTKPCEEQYGSTYRCVSVLTVLHQDWLNGKEYKCKVSNKALPAPIEK |
| | | | TISKAKGQPREPQVYTLPPSREEMTKNQVSLTCLVKGFYPSDIAVEWE |
| | | | SNGQPENNYKTTPPVLDSDGSFFLYSKLTVDKSRWQQGNVFSCSVM |
| | | | HEALHNHYTQKSLSLSPGKGGGGSGGGGSGGGGSGGGGSGQPREP |
| | | | QVYTLPPSREEMTKNQVSLTCLVKGFYPSDIAVEWESNGQPENNYKT |
| | | | TPPVLDSDGSFFLYSKLTVDKSRWQQGNVFSCSVMHEALHNHYTQK |
| | | | SLSLSPGK |
| 1458. | IgG3 hinge | | ELKTPLGDTTHTCPRCP |
| 1459. | IgG1 hinge | | EPKSCDKTHTCPPCP |

1. An antibody construct comprising at least three domains, wherein:
a first domain binds to a target cell surface antigen,
a second domain binds to an extracellular epitope of the human and/or the Macaca CD3ε chain; and
a third domain comprises two polypeptide monomers, each comprising a hinge, a CH2 and a CH3 domain, wherein said two polypeptide monomers are fused to each other via a peptide linker.

2. The antibody construct of claim 1, wherein the antibody construct is a single chain antibody construct.

3. The antibody construct of claim 1, wherein said third domain comprises in an amino to carboxyl order:
hinge-CH2-CH3-linker-hinge-CH2-CH3.

4. The antibody construct of claim 1, wherein each of said polypeptide monomers has an amino acid sequence that is at least 90% identical to a sequence selected from the group consisting of: SEQ ID NOs: 17-24.

5. The antibody construct of claim 4, wherein each of said polypeptide monomers has an amino acid sequence selected from the group consisting of SEQ ID NOs: 17-24.

6. The antibody construct of claim 1, wherein the CH2 domain comprises an intra domain cysteine disulfide bridge.

7. The antibody construct of claim 1, wherein
(i) the first domain comprises two antibody variable domains and the second domain comprises two antibody variable domains;
(ii) the first domain comprises one antibody variable domain and the second domain comprises two antibody variable domains;
(iii) the first domain comprises two antibody variable domains and the second domain comprises one antibody variable domain; or
(iv) the first domain comprises one antibody variable domain and the second domain comprises one antibody variable domain.

8. The antibody construct of claim 1, wherein the first and second domain are fused to the third domain via a peptide linker.

9. The antibody construct of claim 1, wherein the antibody construct comprises in an amino to carboxyl order:
(a) the first domain;
(b) a peptide linker having an amino acid sequence selected from the group consisting of SEQ ID NOs: 1-3;
(c) the second domain;
(d) a peptide linker having an amino acid sequence selected from the group consisting of SEQ ID NOs: 1, 2, 3, 9, 10, 11 and 12;
(e) the first polypeptide monomer of the third domain;
(f) a peptide linker having an amino acid sequence selected from the group consisting of SEQ ID NOs: 5, 6, 7 and 8; and
(g) the second polypeptide monomer of the third domain.

10. The antibody construct of claim 1, wherein the target cell surface antigen is a tumor antigen, an antigen specific for an immunological disorder or a viral antigen.

11. The antibody construct of claim 10, wherein the tumor antigen is selected from the group consisting of CDH19, MSLN, DLL3, FLT3, EGFRvIII, CD33, CD19, CD20, and CD70.

12. The antibody construct of claim 1, wherein the antibody construct comprises in an amino to carboxyl order:
(a) the first domain having an amino acid sequence selected from the group consisting of SEQ ID NOs: 52, 70, 58, 76, 88, 106, 124, 94, 112, 130, 142,160, 178, 148, 166, 184, 196, 214, 232, 202, 220, 238, 250, 266, 282, 298, 255, 271, 287, 303, 322, 338, 354, 370, 386, 402, 418, 434, 450, 466, 482, 498, 514, 530, 546, 327, 343, 359, 375, 391, 407, 423, 439, 455, 471, 487, 503, 519, 353, 551, 592, 608, 624, 640, 656, 672, 688, 704, 720, 736, 752, 768, 784, 800, 816, 832, 848, 864, 880, 896, 912, 928, 944, 960, 976, 992, 1008, 1024, 1040, 1056, 1072, 1088, 1104, 1120, 1136, 1152, 1168, 1184, 597, 613, 629, 645, 661, 677, 693, 709, 725, 741, 757, 773, 789, 805, 821, 837, 853, 869, 885, 901, 917, 933, 949, 965, 981, 997, 1013, 1029, 1045, 1061, 1077, 1093, 1109, 1125, 1141, 1157, 1173, 1189, 1277, 1289, 1301, 1313, 1325, 1337, 1349, 1361, 1373, 1385, 1397, 1409, 1421, 1433, and 1445;
(b) a peptide linker having an amino acid sequence selected from the group consisting of SEQ ID NOs: 1-3;
(c) the second domain having an amino acid sequence selected from the group consisting of SEQ ID NOs: 23, 25, 41, 43, 59, 61, 77, 79, 95, 97, 113, 115, 131, 133, 149, 151, 167, 169, 185 or 187 of WO 2008/119567 or of SEQ ID NO: 15;
(d) a peptide linker having an amino acid sequence selected from the group consisting of SEQ ID NOs: 1, 2, 3, 9, 10, 11 and 12;
(e) the first polypeptide monomer of the third domain having a polypeptide sequence selected from the group consisting of SEQ ID NOs: 17-24;
(f) a peptide linker having an amino acid sequence selected from the group consisting of SEQ ID NOs: 5, 6, 7 and 8; and
(g) the second polypeptide monomer of the third domain having an amino acid sequence selected from the group consisting of SEQ ID NOs: 17-24.

13. The antibody construct of claim 12 comprising an amino acid sequence selected from the group consisting of:
(a) SEQ ID NOs: 54, 55, 60, and 61;
(b) SEQ ID NOs: 72, 73, 78, and 79;
(c) SEQ ID NOs: 90, 91, 96, 97, 108, 109, 114, and 115;
(d) SEQ ID NOs: 144, 145, 150, 151, 162, 163, 168, 169, 180, 181, 186, and 187;
(e) SEQ ID NOs: 198, 199, 204, 205, 216, 217, 222, 223, 234, 235, 240, and 241;
(f) SEQ ID NOs: 252, 306, 257, 307, 268, 308, 273, 309, 284, 310, 289, 311, 300, 312, 305, and 313;
(g) SEQ ID NOs: 324, 554, 329, 555, 340, 556, 345, 557, 356, 558, 361, 559, 372, 560, 377, 561, 388, 562, 393, 563, 404, 564, 409, 565, 420, 566, 425, 567, 436, 568, 441, 569, 452, 570, 457, 571, 468, 572, 473, 573, 484, 574, 489, 575, 500, 576, 505, 577, 516, 578, 521, 579, 532, 580, 537, 581, 548, 582, 553, and 583;
(h) SEQ ID NOs: 594, 610, 626, 642, 658, 674, 690, 706, 722, 738, 754, 77, 786, 802, 818, 834, 850, 866, 882, 898, 914, 930, 946, 962, 978, 994, 1010, 1026, 1042, 1058, 1074, 1090, 1106, 1122, 1138, 1154, 1170, 1186, 599, 615, 631, 647, 663, 679, 695, 711, 727, 743, 759, 775, 791, 807, 823, 839, 855, 871, 887, 903, 919, 935, 951, 967, 983, 999, 1015, 1031, 1047, 1063, 1079, 1095, 1111, 1127, 1143, 1159, 1175, 1191, and 1192-1267;
(i) SEQ ID NO: 43; and
(j) SEQ ID Nos: 1279, 1280, 1291, 1292, 1303, 1304, 1315, 1316, 1327, 1328, 1339, 1340, 1351, 1352, 1363, 1364, 1375, 1376, 1387, 1388, 1399, 1400, 1411, 1412, 1423, 1424, 1435, 1436, 1447, and 1448.

14. A polynucleotide encoding the antibody construct of claim 1.

15. A vector comprising the polynucleotide of claim 14.

16. A host cell transformed or transfected with the polynucleotide of claim 14.

17. A process for producing the antibody construct of claim 1, said process comprising culturing a host cell transformed or transfected with a polynucleotide encoding an antibody construct antibody construct comprising at least three domains, wherein:
a first domain binds to a target cell surface antigen,
a second domain binds to an extracellular epitope of the human and/or the Macaca CD3ε chain; and
a third domain comprises two polypeptide monomers, each comprising a hinge, a CH2 and a CH3 domain, wherein said two polypeptide monomers are fused to each other via a peptide linker
under conditions allowing the expression of the antibody construct, and recovering the antibody construct from the culture.

18. A pharmaceutical composition comprising the antibody construct of claim 1 and a carrier, stabilizer, excipient, diluent, solubilizer, surfactant, emulsifier, preservative or adjuvant.

19-20. (canceled)

21. A method of treating or ameliorating a proliferative disease, a tumorous disease, a viral disease or an immunological disorder comprising the step of administering to a subject in need thereof an effective amount of the antibody construct of claim 1.

22. A kit comprising the antibody construct of claim 1 packaged in a container or recipient.

23. The kit of claim 22 further comprising directions for use.

The application's sequence listing, which the Patent Office published only in electronic form, follows.

SEQUENCE LISTING (1459 sequences)

SEQ ID NO: 1 - protein, 5 aa, Artificial Sequence
  Synthetic peptide
GGGGS

SEQ ID NO: 2 - protein, 10 aa, Artificial Sequence
  Synthetic peptide
GGGGSGGGGS

SEQ ID NO: 3 - protein, 15 aa, Artificial Sequence
  Synthetic peptide
GGGGSGGGGSGGGGS

SEQ ID NO: 4 - protein, 20 aa, Artificial Sequence
  Synthetic peptide
GGGGSGGGGSGGGGSGGGGS

SEQ ID NO: 5 - protein, 25 aa, Artificial Sequence
  Synthetic peptide
GGGGSGGGGSGGGGSGGGGSGGGGS

SEQ ID NO: 6 - protein, 30 aa, Artificial Sequence
  Synthetic peptide
GGGGSGGGGSGGGGSGGGGSGGGGSGGGGS

SEQ ID NO: 7 - protein, 35 aa, Artificial Sequence
  Synthetic peptide
GGGGSGGGGSGGGGSGGGGSGGGGSGGGGSGGGGS

SEQ ID NO: 8 - protein, 40 aa, Artificial Sequence
  Synthetic peptide
GGGGSGGGGSGGGGSGGGGSGGGGSGGGGSGGGGSGGGGS

SEQ ID NO: 9 - protein, 6 aa, Artificial Sequence
  Synthetic peptide
PGGGGS

SEQ ID NO: 10 - protein, 6 aa, Artificial Sequence
  Synthetic peptide
PGGDGS

SEQ ID NO: 11 - protein, 6 aa, Artificial Sequence
  Synthetic peptide
SGGGGS

SEQ ID NO: 12 - protein, 4 aa, Artificial Sequence
  Synthetic peptide
GGGG

SEQ ID NO: 13 - protein, 109 aa, Artificial Sequence
  Synthetic peptide
QTVVTQEPSLTVSPGGTVTLTCGSSTGAVTSGNYPNWVQQKPGQAPRGLIGGTKFLAPGTPARFSGSLLGGKAALTLSGVQPEDEAEYYCVLWYSNRWVFGGGTKLTVL

SEQ ID NO: 14 - protein, 125 aa, Artificial Sequence
  Synthetic peptide
EVQLVESGGGLVQPGGSLRLSCAASGFTFNSYAMNWVRQAPGKGLEWVARIRSKYNNYATYYADSVKGRFTISRDDSKNTAYLQMNSLKTEDTAVYYCVRHGNFGNSYVSWWAYWGQGTLVTVSS

SEQ ID NO: 15 - protein, 249 aa, Artificial Sequence
  Synthetic peptide
EVQLVESGGGLVQPGGSLRLSCAASGFTFNSYAMNWVRQAPGKGLEWVARIRSKYNNYATYYADSVKGRFTISRDDSKNTAYLQMNSLKTEDTAVYYCVRHGNFGNSYVSWWAYWGQGTLVTVSSGGGGSGGGGSGGGGSQTVVTQEPSLTVSPGGTVTLTCGSSTGAVTSGNYPNWVQQKPGQAPRGLIGGTKFLAPGTPARFSGSLLGGKAALTLSGVQPEDEAEYYCVLWYSNRWVFGGGTKLTVL

SEQ ID NO: 16 - protein, 6 aa, Artificial Sequence
  Synthetic peptide
HHHHHH

SEQ ID NO: 17 - protein, 227 aa, Artificial Sequence
  Synthetic peptide
DKTHTCPPCPAPELLGGPSVFLFPPKPKDTLMISRTPEVTCVVVDVSHEDPEVKFNWYVDGVEVHNAKTKPCEEQYGSTYRCVSVLTVLHQDWLNGKEYKCKVSNKALPAPIEKTISKAKGQPREPQVYTLPPSREEMTKNQVSLTCLVKGFYPSDIAVEWESNGQPENNYKTTPPVLDSDGSFFLYSKLTVDKSRWQQGNVFSCSVMHEALHNHYTQKSLSLSPGK

SEQ ID NO: 18 - protein, 225 aa, Artificial Sequence
  Synthetic peptide
DKTHTCPPCPAPELLGGPSVFLFPPKPKDTLMISRTPEVTCVVVDVSHEDPEVKFNWYVDGVEVHNAKTKPCEEQYGSTYRCVSVLTVLHQDWLNGKEYKCKVSNKALPAPIEKTISKAKGQPREPQVYTLPPSREEMTKNQVSLTCLVKGFYPSDIAVEWESNGQPENNYKTTPPVLDSDGSFFLYSKLTVDKSRWQQGNVFSCSVMHEALHNHYTQKSLSLSP

SEQ ID NO: 19 - protein, 227 aa, Artificial Sequence
  Synthetic peptide
DKTHTCPPCPAPELLGGPSVFLFPPKPKDTLMISRTPEVTCVVVDVSHEDPEVKFNWYVDGVEVHNAKTKPREEQYNSTYRVVSVLTVLHQDWLNGKEYKCKVSNKALPAPIEKTISKAKGQPREPQVYTLPPSREEMTKNQVSLTCLVKGFYPSDIAVEWESNGQPENNYKTTPPVLDSDGSFFLYSKLTVDKSRWQQGNVFSCSVMHEALHNHYTQKSLSLSPGK

SEQ ID NO: 20 - protein, 225 aa, Artificial Sequence
  Synthetic peptide
DKTHTCPPCPAPELLGGPSVFLFPPKPKDTLMISRTPEVTCVVVDVSHEDPEVKFNWYVDGVEVHNAKTKPREEQYNSTYRVVSVLTVLHQDWLNGKEYKCKVSNKALPAPIEKTISKAKGQPREPQVYTLPPSREEMTKNQVSLTCLVKGFYPSDIAVEWESNGQPENNYKTTPPVLDSDGSFFLYSKLTVDKSRWQQGNVFSCSVMHEALHNHYTQKSLSLSP

SEQ ID NO: 21 - protein, 227 aa, Artificial Sequence
  Synthetic peptide
DKTHTCPPCPAPELLGGPSVFLFPPKPKDTLMISRTPEVTCVVVDVSHEDPEVKFNWYVDGVEVHNAKTKPREEQYGSTYRVVSVLTVLHQDWLNGKEYKCKVSNKALPAPIEKTISKAKGQPREPQVYTLPPSREEMTKNQVSLTCLVKGFYPSDIAVEWESNGQPENNYKTTPPVLDSDGSFFLYSKLTVDKSRWQQGNVFSCSVMHEALHNHYTQKSLSLSPGK

SEQ ID NO: 22 - protein, 225 aa, Artificial Sequence
  Synthetic peptide
DKTHTCPPCPAPELLGGPSVFLFPPKPKDTLMISRTPEVTCVVVDVSHEDPEVKFNWYVDGVEVHNAKTKPREEQYGSTYRVVSVLTVLHQDWLNGKEYKCKVSNKALPAPIEKTISKAKGQPREPQVYTLPPSREEMTKNQVSLTCLVKGFYPSDIAVEWESNGQPENNYKTTPPVLDSDGSFFLYSKLTVDKSRWQQGNVFSCSVMHEALHNHYTQKSLSLSP

SEQ ID NO: 23 - protein, 227 aa, Artificial Sequence
  Synthetic peptide
DKTHTCPPCPAPELLGGPSVFLFPPKPKDTLMISRTPEVTCVVVDVSHEDPEVKFNWYVDGVEVHNAKTKPCEEQYNSTYRCVSVLTVLHQDWLNGKEYKCKVSNKALPAPIEKTISKAKGQPREPQVYTLPPSREEMTKNQVSLTCLVKGFYPSDIAVEWESNGQPENNYKTTPPVLDSDGSFFLYSKLTVDKSRWQQGNVFSCSVMHEALHNHYTQKSLSLSPGK

SEQ ID NO: 24 - protein, 225 aa, Artificial Sequence
  Synthetic peptide
DKTHTCPPCPAPELLGGPSVFLFPPKPKDTLMISRTPEVTCVVVDVSHEDPEVKFNWYVDGVEVHNAKTKPCEEQYNSTYRCVSVLTVLHQDWLNGKEYKCKVSNKALPAPIEKTISKAKGQPREPQVYTLPPSREEMTKNQVSLTCLVKGFYPSDIAVEWESNGQPENNYKTTPPVLDSDGSFFLYSKLTVDKSRWQQGNVFSCSVMHEALHNHYTQKSLSLSP

SEQ ID NO: 25 - protein, 484 aa, Artificial Sequence
  Synthetic peptide
DKTHTCPPCPAPELLGGPSVFLFPPKPKDTLMISRTPEVTCVVVDVSHEDPEVKFNWYVDGVEVHNAKTKPCEEQYGSTYRCVSVLTVLHQDWLNGKEYKCKVSNKALPAPIEKTISKAKGQPREPQVYTLPPSREEMTKNQVSLTCLVKGFYPSDIAVEWESNGQPENNYKTTPPVLDSDGSFFLYSKLTVDKSRWQQGNVFSCSVMHEALHNHYTQKSLSLSPGKGGGGSGGGGSGGGGSGGGGSGGGGSGGGGSDKTHTCPPCPAPELLGGPSVFLFPPKPKDTLMISRTPEVTCVVVDVSHEDPEVKFNWYVDGVEVHNAKTKPCEEQYGSTYRCVSVLTVLHQDWLNGKEYKCKVSNKALPAPIEKTISKAKGQPREPQVYTLPPSREEMTKNQVSLTCLVKGFYPSDIAVEWESNGQPENNYKTTPPVLDSDGSFFLYSKLTVDKSRWQQGNVFSCSVMHEALHNHYTQKSLSLSPGK

SEQ ID NO: 26 - protein, 480 aa, Artificial Sequence
  Synthetic peptide
DKTHTCPPCPAPELLGGPSVFLFPPKPKDTLMISRTPEVTCVVVDVSHEDPEVKFNWYVDGVEVHNAKTKPCEEQYGSTYRCVSVLTVLHQDWLNGKEYKCKVSNKALPAPIEKTISKAKGQPREPQVYTLPPSREEMTKNQVSLTCLVKGFYPSDIAVEWESNGQPENNYKTTPPVLDSDGSFFLYSKLTVDKSRWQQGNVFSCSVMHEALHNHYTQKSLSLSPGGGGSGGGGSGGGGSGGGGSGGGGSGGGGSDKTHTCPPCPAPELLGGPSVFLFPPKPKDTLMISRTPEVTCVVVDVSHEDPEVKFNWYVDGVEVHNAKTKPCEEQYGSTYRCVSVLTVLHQDWLNGKEYKCKVSNKALPAPIEKTISKAKGQPREPQVYTLPPSREEMTKNQVSLTCLVKGFYPSDIAVEWESNGQPENNYKTTPPVLDSDGSFFLYSKLTVDKSRWQQGNVFSCSVMHEALHNHYTQKSLSLSP

SEQ ID NO: 27 - protein, 484 aa, Artificial Sequence
  Synthetic peptide
DKTHTCPPCPAPELLGGPSVFLFPPKPKDTLMISRTPEVTCVVVDVSHEDPEVKFNWYVDGVEVHNAKTKPREEQYNSTYRVVSVLTVLHQDWLNGKEYKCKVSNKALPAPIEKTISKAKGQPREPQVYTLPPSREEMTKNQVSLTCLVKGFYPSDIAVEWESNGQPENNYKTTPPVLDSDGSFFLYSKLTVDKSRWQQGNVFSCSVMHEALHNHYTQKSLSLSPGKGGGGSGGGGSGGGGSGGGGSGGGGSGGGGSDKTHTCPPCPAPELLGGPSVFLFPPKPKDTLMISRTPEVTCVVVDVSHEDPEVKFNWYVDGVEVHNAKTKPREEQYNSTYRVVSVLTVLHQDWLNGKEYKCKVSNKALPAPIEKTISKAKGQPREPQVYTLPPSREEMTKNQVSLTCLVKGFYPSDIAVEWESNGQPENNYKTTPPVLDSDGSFFLYSKLTVDKSRWQQGNVFSCSVMHEALHNHYTQKSLSLSPGK

SEQ ID NO: 28 - protein, 480 aa, Artificial Sequence
  Synthetic peptide
DKTHTCPPCPAPELLGGPSVFLFPPKPKDTLMISRTPEVTCVVVDVSHEDPEVKFNWYVDGVEVHNAKTKPREEQYNSTYRVVSVLTVLHQDWLNGKEYKCKVSNKALPAPIEKTISKAKGQPREPQVYTLPPSREEMTKNQVSLTCLVKGFYPSDIAVEWESNGQPENNYKTTPPVLDSDGSFFLYSKLTVDKSRWQQGNVFSCSVMHEALHNHYTQKSLSLSPGGGGSGGGGSGGGGSGGGGSGGGGSGGGGSDKTHTCPPCPAPELLGGPSVFLFPPKPKDTLMISRTPEVTCVVVDVSHEDPEVKFNWYVDGVEVHNAKTKPREEQYNSTYRVVSVLTVLHQDWLNGKEYKCKVSNKALPAPIEKTISKAKGQPREPQVYTLPPSREEMTKNQVSLTCLVKGFYPSDIAVEWESNGQPENNYKTTPPVLDSDGSFFLYSKLTVDKSRWQQGNVFSCSVMHEALHNHYTQKSLSLSP

SEQ ID NO: 29 - protein, 484 aa, Artificial Sequence
  Synthetic peptide
DKTHTCPPCPAPELLGGPSVFLFPPKPKDTLMISRTPEVTCVVVDVSHEDPEVKFNWYVDGVEVHNAKTKPREEQYGSTYRVVSVLTVLHQDWLNGKEYKCKVSNKALPAPIEKTISKAKGQPREPQVYTLPPSREEMTKNQVSLTCLVKGFYPSDIAVEWESNGQPENNYKTTPPVLDSDGSFFLYSKLTVDKSRWQQGNVFSCSVMHEALHNHYTQKSLSLSPGKGGGGSGGGGSGGGGSGGGGSGGGGSGGGGSDKTHTCPPCPAPELLGGPSVFLFPPKPKDTLMISRTPEVTCVVVDVSHEDPEVKFNWYVDGVEVHNAKTKPREEQYGSTYRVVSVLTVLHQDWLNGKEYKCKVSNKALPAPIEKTISKAKGQPREPQVYTLPPSREEMTKNQVSLTCLVKGFYPSDIAVEWESNGQPENNYKTTPPVLDSDGSFFLYSKLTVDKSRWQQGNVFSCSVMHEALHNHYTQKSLSLSPGK

SEQ ID NO: 30 - protein, 480 aa, Artificial Sequence
  Synthetic peptide
DKTHTCPPCPAPELLGGPSVFLFPPKPKDTLMISRTPEVTCVVVDVSHEDPEVKFNWYVDGVEVHNAKTKPREEQYGSTYRVVSVLTVLHQDWLNGKEYKCKVSNKALPAPIEKTISKAKGQPREPQVYTLPPSREEMTKNQVSLTCLVKGFYPSDIAVEWESNGQPENNYKTTPPVLDSDGSFFLYSKLTVDKSRWQQGNVFSCSVMHEALHNHYTQKSLSLSPGGGGSGGGGSGGGGSGGGGSGGGGSGGGGSDKTHTCPPCPAPELLGGPSVFLFPPKPKDTLMISRTPEVTCVVVDVSHEDPEVKFNWYVDGVEVHNAKTKPREEQYGSTYRVVSVLTVLHQDWLNGKEYKCKVSNKALPAPIEKTISKAKGQPREPQVYTLPPSREEMTKNQVSLTCLVKGFYPSDIAVEWESNGQPENNYKTTPPVLDSDGSFFLYSKLTVDKSRWQQGNVFSCSVMHEALHNHYTQKSLSLSP

SEQ ID NO: 31 - protein, 484 aa, Artificial Sequence
  Synthetic peptide
DKTHTCPPCPAPELLGGPSVFLFPPKPKDTLMISRTPEVTCVVVDVSHEDPEVKFNWYVDGVEVHNAKTKPCEEQYNSTYRCVSVLTVLHQDWLNGKEYKCKVSNKALPAPIEKTISKAKGQPREPQVYTLPPSREEMTKNQVSLTCLVKGFYPSDIAVEWESNGQPENNYKTTPPVLDSDGSFFLYSKLTVDKSRWQQGNVFSCSVMHEALHNHYTQKSLSLSPGKGGGGSGGGGSGGGGSGGGGSGGGGSGGGGSDKTHTCPPCPAPELLGGPSVFLFPPKPKDTLMISRTPEVTCVVVDVSHEDPEVKFNWYVDGVEVHNAKTKPCEEQYNSTYRCVSVLTVLHQDWLNGKEYKCKVSNKALPAPIEKTISKAKGQPREPQVYTLPPSREEMTKNQVSLTCLVKGFYPSDIAVEWESNGQPENNYKTTPPVLDSDGSFFLYSKLTVDKSRWQQGNVFSCSVMHEALHNHYTQKSLSLSPGK

SEQ ID NO: 32 - protein, 480 aa, Artificial Sequence
  Synthetic peptide
DKTHTCPPCPAPELLGGPSVFLFPPKPKDTLMISRTPEVTCVVVDVSHEDPEVKFNWYVDGVEVHNAKTKPCEEQYNSTYRCVSVLTVLHQDWLNGKEYKCKVSNKALPAPIEKTISKAKGQPREPQVYTLPPSREEMTKNQVSLTCLVKGFYPSDIAVEWESNGQPENNYKTTPPVLDSDGSFFLYSKLTVDKSRWQQGNVFSCSVMHEALHNHYTQKSLSLSPGGGGSGGGGSGGGGSGGGGSGGGGSGGGGSDKTHTCPPCPAPELLGGPSVFLFPPKPKDTLMISRTPEVTCVVVDVSHEDPEVKFNWYVDGVEVHNAKTKPCEEQYNSTYRCVSVLTVLHQDWLNGKEYKCKVSNKALPAPIEKTISKAKGQPREPQVYTLPPSREEMTKNQVSLTCLVKGFYPSDIAVEWESNGQPENNYKTTPPVLDSDGSFFLYSKLTVDKSRWQQGNVFSCSVMHEALHNHYTQKSLSLSP

SEQ ID NO: 33 - protein, 725 aa, Artificial Sequence
  Synthetic peptide
QVQLVESGGGLVKPGGSLRLSCAASGFTFSDYYMTWIRQAPGKGLEWLSYISSSGSTIYYADSVKGRFTISRDNAKNSLFLQMNSLRAEDTAVYYCARDRNSHFDYWGQGTLVTVSSGGGGSGGGGSGGGGSDIQMTQSPSSVSASVGDRVTITCRASQGINTWLAWYQQKPGKAPKLLIYGASGLQSGVPSRFSGSGSGTDFTLTISSLQPEDFATYYCQQAKSFPRTFGQGTKVEIKSGGGGSEVQLVESGGGLVQPGGSLKLSCAASGFTFNKYAMNWVRQAPGKGLEWVARIRSKYNNYATYYADSVKDRFTISRDDSKNTAYLQMNNLKTEDTAVYYCVRHGNFGNSYISYWAYWGQGTLVTVSSGGGGSGGGGSGGGGSQTVVTQEPSLTVSPGGTVTLTCGSSTGAVTSGNYPNWVQQKPGQAPRGLIGGTKFLAPGTPARFSGSLLGGKAALTLSGVQPEDEAEYYCVLWYSNRWVFGGGTKLTVLGGGGDKTHTCPPCPAPELLGGPSVFLFPPKPKDTLMISRTPEVTCVVVDVSHEDPEVKFNWYVDGVEVHNAKTKPCEEQYGSTYRCVSVLTVLHQDWLNGKEYKCKVSNKALPAPIEKTISKAKGQPREPQVYTLPPSRKEMTKNQVSLTCLVKGFYPSDIAVEWESNGQPENNYKTTPPVLKSDGSFFLYSKLTVDKSRWQQGNVFSCSVMHEALHNHYTQKSLSLSPGK

SEQ ID NO: 34 - protein, 227 aa, Artificial Sequence
  Synthetic peptide
DKTHTCPPCPAPELLGGPSVFLFPPKPKDTLMISRTPEVTCVVVDVSHEDPEVKFNWYVDGVEVHNAKTKPCEEQYGSTYRCVSVLTVLHQDWLNGKEYKCKVSNKALPAPIEKTISKAKGQPREPQVYTLPPSREEMTKNQVSLTCLVKGFYPSDIAVEWESNGQPENNYDTTPPVLDSDGSFFLYSDLTVDKSRWQQGNVFSCSVMHEALHNHYTQKSLSLSPGK

SEQ ID NO: 35 - protein, 1091 aa, Artificial Sequence
  Synthetic peptide
QVQLVESGGGLVKPGGSLRLSCAASGFTFSDYYMTWIRQAPGKGLEWLSYISSSGSTIYYADSVKGRFTISRDNAKNSLFLQMNSLRAEDTAVYYCARDRNSHFDYWGQGTLVTVSSGGGGSGGGGSGGGGSDIQMTQSPSSVSASVGDRVTITCRASQGINTWLAWYQQKPGKAPKLLIYGASGLQSGVPSRFSGSGSGTDFTLTISSLQPEDFATYYCQQAKSFPRTFGQGTKVEIKSGGGGSEVQLVESGGGLVQPGGSLKLSCAASGFTFNKYAMNWVRQAPGKGLEWVARIRSKYNNYATYYADSVKDRFTISRDDSKNTAYLQMNNLKTEDTAVYYCVRHGNFGNSYISYWAYWGQGTLVTVSSGGGGSGGGGSGGGGSQTVVTQEPSLTVSPGGTVTLTCGSSTGAVTSGNYPNWVQQKPGQAPRGLIGGTKFLAPGTPARFSGSLLGGKAALTLSGVQPEDEAEYYCVLWYSNRWVFGGGTKLTVLPGGDGSDAHKSEVAHRFKDLGEENFKALVLIAFAQYLQQCPFEDHVKLVNEVTEFAKTCVADESAENCDKSLHTLFGDKLCTVATLRETYGEMADCCAKQEPERNECFLQHKDDNPNLPRLVRPEVDVMCTAFHDNEETFLKKYLYEIARRHPYFYAPELLFFAKRYKAAFTECCQAADKAACLLPKLDELRDEGKASSAKQRLKCASLQKFGERAFKAWAVARLSQRFPKAEFAEVSKLVTDLTKVHTECCHGDLLECADDRADLAKYICENQDSISSKLKECCEKPLLEKSHCIAEVENDEMPADLPSLAADFVESKDVCKNYAEAKDVFLGMFLYEYARRHPDYSVVLLLRLAKTYETTLEKCCAAADPHECYAKVFDEFKPLVEEPQNLIKQNCELFEQLGEYKFQNALLVRYTKKVPQVSTPTLVEVSRNLGKVGSKCCKHPEAKRMPCAEDYLSVVLNQLCVLHEKTPVSDRVTKCCTESLVNRRPCFSALEVDETYVPKEFNAETFTFHADICTLSEKERQIKKQTALVELVKHKPKATKEQLKAVMDDFAAFVEKCCKADDKETCFAEEGKKLVAASQAALGLHHHHHH

SEQ ID NO: 36 - protein, 571 aa, Artificial Sequence
  Synthetic peptide
EVQLVESGGGLVQPGGSLKLSCAASGFTFNKYAMNWVRQAPGKGLEWVARIRSKYNNYATYYADSVKDRFTISRDDSKNTAYLQMNNLKTEDTAVYYCVRHGNFGNSYISYWAYWGQGTLVTVSSGGGGSGGGGSSYELTQPPSVSVSPGQTASITCSGDRLGEKYTSWYQQRPGQSPLLVIYQDTKRPSGIPERFSGSNSGNTATLTISGTQAMDEADYYCQAWESSTVVFGGGTKLTVLASTKGPSVFPLAPSSKSTSGGTAALGCLVKDYFPEPVTVSWNSGALTSGVHTFPAVLQSSGLYSLSSVVTVPSSSLGTQTYICNVNHKPSNTKVDKKVEPKSCDKTHTCPPCPAPELLGGPSVFLFPPKPKDTLMISRTPEVTCVVVDVSHEDPEVKFNWYVDGVEVHNAKTKPCEEQYGSTYRCVSVLTVLHQDWLNGKEYKCKVSNKALPAPIEKTISKAKGQPREPQVYTLPPSREEMTKNQVSLTCLVKGFYPSDIAVEWESNGQPENNYDTTPPVLDSDGSFFLYSDLTVDKSRWQQGNVFSCSVMHEALHNHYTQKSLSLSPGK

SEQ ID NO: 37 - protein, 577 aa, Artificial Sequence
  Synthetic peptide
QVQLVESGGGVVQPGGSLRLSCAASGFTFSSYGMHWVRQAPGKGLEWVAFIWYEGSNKYYAESVKDRFTISRDNSKNTLYLQMNSLRAEDTAVYYCARRAGIIGTIGYYYGMDVWGQGTTVTVSSGGGGSGGGGSQTVVTQEPSLTVSPGGTVTLTCGSSTGAVTSGNYPNWVQQKPGQAPRGLIGGTKFLAPGTPARFSGSLLGGKAALTLSGVQPEDEAEYYCVLWYSNRWVFGGGTKLTVLGQPKAAPSVTLFPPSSEELQANKATLVCLISDFYPGAVTVAWKADSSPVKAGVETTTPSKQSNNKYAASSYLSLTPEQWKSHRSYSCQVTHEGSTVEKTVAPTECSDKTHTCPPCPAPELLGGPSVFLFPPKPKDTLMISRTPEVTCVVVDVSHEDPEVKFNWYVDGVEVHNAKTKPCEEQYGSTYRCVSVLTVLHQDWLNGKEYKCKVSNKALPAPIEKTISKAKGQPREPQVYTLPPSRKEMTKNQVSLTCLVKGFYPSDIAVEWESNGQPENNYKTTPPVLKSDGSFFLYSKLTVDKSRWQQGNVFSCSVMHEALHNHYTQKSLSLSPGK

SEQ ID NO: 38 - protein, 732 aa, Artificial Sequence
  Synthetic peptide
QVQLVESGGGVVQPGGSLRLSCAASGFTFSSYGMHWVRQAPGKGLEWVAFIWYEGSNKYYAESVKDRFTISRDNSKNTLYLQMNSLRAEDTAVYYCARRAGIIGTIGYYYGMDVWGQGTTVTVSSGGGGSGGGGSGGGGSSYELTQPPSVSVSPGQTASITCSGDRLGEKYTSWYQQRPGQSPLLVIYQDTKRPSGIPERFSGSNSGNTATLTISGTQAMDEADYYCQAWESSTVVFGGGTKLTVLSGGGGSEVQLVESGGGLVQPGGSLKLSCAASGFTFNKYAMNWVRQAPGKGLEWVARIRSKYNNYATYYADSVKDRFTISRDDSKNTAYLQMNNLKTEDTAVYYCVRHGNFGNSYISYWAYWGQGTLVTVSSGGGGSGGGGSGGGGSQTVVTQEPSLTVSPGGTVTLTCGSSTGAVTSGNYPNWVQQKPGQAPRGLIGGTKFLAPGTPARFSGSLLGGKAALTLSGVQPEDEAEYYCVLWYSNRWVFGGGTKLTVLGGGGDKTHTCPPCPAPELLGGPSVFLFPPKPKDTLMISRTPEVTCVVVDVSHEDPEVKFNWYVDGVEVHNAKTKPCEEQYGSTYRCVSVLTVLHQDWLNGKEYKCKVSNKALPAPIEKTISKAKGQPREPQVYTLPPSRKEMTKNQVSLTCLVKGFYPSDIAVEWESNGQPENNYKTTPPVLKSDGSFFLYSKLTVDKSRWQQGNVFSCSVMHEALHNHYTQKSLSLSPGK

SEQ ID NO: 39 - protein, 227 aa, Artificial Sequence; identical to SEQ ID NO: 34
  Synthetic peptide

SEQ ID NO: 40 - protein, 736 aa, Artificial Sequence
  Synthetic peptide
QVQLVQSGAEVKKPGESVKVSCKASGYTFTNYGMNWVKQAPGQCLEWMGWINTYTGEPTYADKFQGRVTMTTDTSTSTAYMEIRNLGGDDTAVYYCARWSWSDGYYVYFDYWGQGTSVTVSSGGGGSGGGGSGGGGSDIVMTQSPDSLTVSLGERTTINCKSSQSVLDSSTNKNSLAWYQQKPGQPPKLLLSWASTRESGIPDRFSGSGSGTDFTLTIDSPQPEDSATYYCQQSAHFPITFGCGTRLEIKSGGGGSEVQLVESGGGLVQPGGSLKLSCAASGFTFNKYAMNWVRQAPGKGLEWVARIRSKYNNYATYYADSVKDRFTISRDDSKNTAYLQMNNLKTEDTAVYYCVRHGNFGNSYISYWAYWGQGTLVTVSSGGGGSGGGGSGGGGSQTVVTQEPSLTVSPGGTVTLTCGSSTGAVTSGNYPNWVQQKPGQAPRGLIGGTKFLAPGTPARFSGSLLGGKAALTLSGVQPEDEAEYYCVLWYSNRWVFGGGTKLTVLGGGGDKTHTCPPCPAPELLGGPSVFLFPPKPKDTLMISRTPEVTCVVVDVSHEDPEVKFNWYVDGVEVHNAKTKPCEEQYGSTYRCVSVLTVLHQDWLNGKEYKCKVSNKALPAPIEKTISKAKGQPREPQVYTLPPSRKEMTKNQVSLTCLVKGFYPSDIAVEWESNGQPENNYKTTPPVLKSDGSFFLYSKLTVDKSRWQQGNVFSCSVMHEALHNHYTQKSLSLSPGK

SEQ ID NO: 41 - protein, 227 aa, Artificial Sequence; identical to SEQ ID NO: 34
  Synthetic peptide

SEQ ID NO: 42 - protein, 993 aa, Artificial Sequence
  Synthetic peptide
QVQLVQSGAEVKKPGESVKVSCKASGYTFTNYGMNWVKQAPGQCLEWMGWINTYTGEPTYADKFQGRVTMTTDTSTSTAYMEIRNLGGDDTAVYYCARWSWSDGYYVYFDYWGQGTSVTVSSGGGGSGGGGSGGGGSDIVMTQSPDSLTVSLGERTTINCKSSQSVLDSSTNKNSLAWYQQKPGQPPKLLLSWASTRESGIPDRFSGSGSGTDFTLTIDSPQPEDSATYYCQQSAHFPITFGCGTRLEIKSGGGGSEVQLVESGGGLVQPGGSLKLSCAASGFTFNKYAMNWVRQAPGKGLEWVARIRSKYNNYATYYADSVKDRFTISRDDSKNTAYLQMNNLKTEDTAVYYCVRHGNFGNSYISYWAYWGQGTLVTVSSGGGGSGGGGSGGGGSQTVVTQEPSLTVSPGGTVTLTCGSSTGAVTSGNYPNWVQQKPGQAPRGLIGGTKFLAPGTPARFSGSLLGGKAALTLSGVQPEDEAEYYCVLWYSNRWVFGGGTKLTVLGGGGDKTHTCPPCPAPELLGGPSVFLFPPKPKDTLMISRTPEVTCVVVDVSHEDPEVKFNWYVDGVEVHNAKTKPCEEQYGSTYRCVSVLTVLHQDWLNGKEYKCKVSNKALPAPIEKTISKAKGQPREPQVYTLPPSREEMTKNQVSLTCLVKGFYPSDIAVEWESNGQPENNYKTTPPVLDSDGSFFLYSKLTVDKSRWQQGNVFSCSVMHEALHNHYTQKSLSLSPGKGGGGSGGGGSGGGGSGGGGSGGGGSGGGGSDKTHTCPPCPAPELLGGPSVFLFPPKPKDTLMISRTPEVTCVVVDVSHEDPEVKFNWYVDGVEVHNAKTKPCEEQYGSTYRCVSVLTVLHQDWLNGKEYKCKVSNKALPAPIEKTISKAKGQPREPQVYTLPPSREEMTKNQVSLTCLVKGFYPSDIAVEWESNGQPENNYKTTPPVLDSDGSFFLYSKLTVDKSRWQQGNVFSCSVMHEALHNHYTQKSLSLSPGK

SEQ ID NO: 43 - protein, 989 aa, Artificial Sequence
  Synthetic peptide
QVQLVQSGAEVKKPGSSVKVSCKASGYAFSYSWINWVRQAPGQGLEWMGRIFPGDGDTDYNGKFKGRVTITADKSTSTAYMELSSLRSEDTAVYYCARNVFDGYWLVYWGQGTLVTVSSGGGGSGGGGSGGGGSDIVMTQTPLSLPVTPGEPASISCRSSKSLLHSNGITYLYWYLQKPGQSPQLLIYQMSNLVSGVPDRFSGSGSGTDFTLKISRVEAEDVGVYYCAQNLELPYTFGGGTKVEIKSGGGGSEVQLVESGGGLVQPGGSLKLSCAASGFTFNKYAMNWVRQAPGKGLEWVARIRSKYNNYATYYADSVKDRFTISRDDSKNTAYLQMNNLKTEDTAVYYCVRHGNFGNSYISYWAYWGQGTLVTVSSGGGGSGGGGSGGGGSQTVVTQEPSLTVSPGGTVTLTCGSSTGAVTSGNYPNWVQQKPGQAPRGLIGGTKFLAPGTPARFSGSLLGGKAALTLSGVQPEDEAEYYCVLWYSNRWVFGGGTKLTVLGGGGDKTHTCPPCPAPELLGGPSVFLFPPKPKDTLMISRTPEVTCVVVDVSHEDPEVKFNWYVDGVEVHNAKTKPCEEQYGSTYRCVSVLTVLHQDWLNGKEYKCKVSNKALPAPIEKTISKAKGQPREPQVYTLPPSREEMTKNQVSLTCLVKGFYPSDIAVEWESNGQPENNYKTTPPVLDSDGSFFLYSKLTVDKSRWQQGNVFSCSVMHEALHNHYTQKSLSLSPGKGGGGSGGGGSGGGGSGGGGSGGGGSGGGGSDKTHTCPPCPAPELLGGPSVFLFPPKPKDTLMISRTPEVTCVVVDVSHEDPEVKFNWYVDGVEVHNAKTKPCEEQYGSTYRCVSVLTVLHQDWLNGKEYKCKVSNKALPAPIEKTISKAKGQPREPQVYTLPPSREEMTKNQVSLTCLVKGFYPSDIAVEWESNGQPENNYKTTPPVLDSDGSFFLYSKLTVDKSRWQQGNVFSCSVMHEALHNHYTQKSLSLSPGK

SEQ ID NO: 44 - protein, 5 aa, Artificial Sequence
  Synthetic peptide
NYGMN

SEQ ID NO: 45 - protein, 17 aa, Artificial Sequence
  Synthetic peptide
WINTYTGEPTYADKFQG

SEQ ID NO: 46 - protein, 13 aa, Artificial Sequence
  Synthetic peptide
WSWSDGYYVYFDY

SEQ ID NO: 47 - protein, 17 aa, Artificial Sequence
  Synthetic peptide
KSSQSVLDSSTNKNSLA

SEQ ID NO: 48 - protein, 7 aa, Artificial Sequence
  Synthetic peptide
WASTRES

SEQ ID NO: 49 - protein, 9 aa, Artificial Sequence
  Synthetic peptide
QQSAHFPIT

SEQ ID NO: 50 - protein, 122 aa, Artificial Sequence
  Synthetic peptide
QVQLVQSGAEVKKPGESVKVSCKASGYTFTNYGMNWVKQAPGQGLEWMGWINTYTGEPTYADKFQGRVTMTTDTSTSTAYMEIRNLGGDDTAVYYCARWSWSDGYYVYFDYWGQGTSVTVSS

SEQ ID NO: 51 - protein, 113 aa, Artificial Sequence
  Synthetic peptide
DIVMTQSPDSLTVSLGERTTINCKSSQSVLDSSTNKNSLAWYQQKPGQPPKLLLSWASTRESGIPDRFSGSGSGTDFTLTIDSPQPEDSATYYCQQSAHFPITFGQGTRLEIK

SEQ ID NO: 52 - protein, 250 aa, Artificial Sequence
  Synthetic peptide
QVQLVQSGAEVKKPGESVKVSCKASGYTFTNYGMNWVKQAPGQGLEWMGWINTYTGEPTYADKFQGRVTMTTDTSTSTAYMEIRNLGGDDTAVYYCARWSWSDGYYVYFDYWGQGTSVTVSSGGGGSGGGGSGGGGSDIVMTQSPDSLTVSLGERTTINCKSSQSVLDSSTNKNSLAWYQQKPGQPPKLLLSWASTRESGIPDRFSGSGSGTDFTLTIDSPQPEDSATYYCQQSAHFPITFGQGTRLEIK

SEQ ID NO: 53 - protein, 505 aa, Artificial Sequence
  Synthetic peptide
QVQLVQSGAEVKKPGESVKVSCKASGYTFTNYGMNWVKQAPGQGLEWMGWINTYTGEPTYADKFQGRVTMTTDTSTSTAYMEIRNLGGDDTAVYYCARWSWSDGYYVYFDYWGQGTSVTVSSGGGGSGGGGSGGGGSDIVMTQSPDSLTVSLGERTTINCKSSQSVLDSSTNKNSLAWYQQKPGQPPKLLLSWASTRESGIPDRFSGSGSGTDFTLTIDSPQPEDSATYYCQQSAHFPITFGQGTRLEIKSGGGGSEVQLVESGGGLVQPGGSLKLSCAASGFTFNKYAMNWVRQAPGKGLEWVARIRSKYNNYATYYADSVKDRFTISRDDSKNTAYLQMNNLKTEDTAVYYCVRHGNFGNSYISYWAYWGQGTLVTVSSGGGGSGGGGSGGGGSQTVVTQEPSLTVSPGGTVTLTCGSSTGAVTSGNYPNWVQQKPGQAPRGLIGGTKFLAPGTPARFSGSLLGGKAALTLSGVQPEDEAEYYCVLWYSNRWVFGGGTKLTVL

SEQ ID NO: 54 - protein, 993 aa, Artificial Sequence
  Synthetic peptide
QVQLVQSGAEVKKPGESVKVSCKASGYTFTNYGMNWVKQAPGQGLEWMGWINTYTGEPTYADKFQGRVTMTTDTSTSTAYMEIRNLGGDDTAVYYCARWSWSDGYYVYFDYWGQGTSVTVSSGGGGSGGGGSGGGGSDIVMTQSPDSLTVSLGERTTINCKSSQSVLDSSTNKNSLAWYQQKPGQPPKLLLSWASTRESGIPDRFSGSGSGTDFTLTIDSPQPEDSATYYCQQSAHFPITFGQGTRLEIKSGGGGSEVQLVESGGGLVQPGGSLKLSCAASGFTFNKYAMNWVRQAPGKGLEWVARIRSKYNNYATYYADSVKDRFTISRDDSKNTAYLQMNNLKTEDTAVYYCVRHGNFGNSYISYWAYWGQGTLVTVSSGGGGSGGGGSGGGGSQTVVTQEPSLTVSPGGTVTLTCGSSTGAVTSGNYPNWVQQKPGQAPRGLIGGTKFLAPGTPARFSGSLLGGKAALTLSGVQPEDEAEYYCVLWYSNRWVFGGGTKLTVLGGGGDKTHTCPPCPAPELLGGPSVFLFPPKPKDTLMISRTPEVTCVVVDVSHEDPEVKFNWYVDGVEVHNAKTKPCEEQYGSTYRCVSVLTVLHQDWLNGKEYKCKVSNKALPAPIEKTISKAKGQPREPQVYTLPPSREEMTKNQVSLTCLVKGFYPSDIAVEWESNGQPENNYKTTPPVLDSDGSFFLYSKLTVDKSRWQQGNVFSCSVMHEALHNHYTQKSLSLSPGKGGGGSGGGGSGGGGSGGGGSGGGGSGGGGSDKTHTCPPCPAPELLGGPSVFLFPPKPKDTLMISRTPEVTCVVVDVSHEDPEVKFNWYVDGVEVHNAKTKPCEEQYGSTYRCVSVLTVLHQDWLNGKEYKCKVSNKALPAPIEKTISKAKGQPREPQVYTLPPSREEMTKNQVSLTCLVKGFYPSDIAVEWESNGQPENNYKTTPPVLDSDGSFFLYSKLTVDKSRWQQGNVFSCSVMHEALHNHYTQKSLSLSPGK

SEQ ID NO: 55 - protein, 991 aa, Artificial Sequence
  Synthetic peptide
QVQLVQSGAEVKKPGESVKVSCKASGYTFTNYGMNWVKQAPGQGLEWMGWINTYTGEPTYADKFQGRVTMTTDTSTSTAYMEIRNLGGDDTAVYYCARWSWSDGYYVYFDYWGQGTSVTVSSGGGGSGGGGSGGGGSDIVMTQSPDSLTVSLGERTTINCKSSQSVLDSSTNKNSLAWYQQKPGQPPKLLLSWASTRESGIPDRFSGSGSGTDFTLTIDSPQPEDSATYYCQQSAHFPITFGQGTRLEIKSGGGGSEVQLVESGGGLVQPGGSLKLSCAASGFTFNKYAMNWVRQAPGKGLEWVARIRSKYNNYATYYADSVKDRFTISRDDSKNTAYLQMNNLKTEDTAVYYCVRHGNFGNSYISYWAYWGQGTLVTVSSGGGGSGGGGSGGGGSQTVVTQEPSLTVSPGGTVTLTCGSSTGAVTSGNYPNWVQQKPGQAPRGLIGGTKFLAPGTPARFSGSLLGGKAALTLSGVQPEDEAEYYCVLWYSNRWVFGGGTKLTVLGGGGDKTHTCPPCPAPELLGGPSVFLFPPKPKDTLMISRTPEVTCVVVDVSHEDPEVKFNWYVDGVEVHNAKTKPCEEQYGSTYRCVSVLTVLHQDWLNGKEYKCKVSNKALPAPIEKTISKAKGQPREPQVYTLPPSREEMTKNQVSLTCLVKGFYPSDIAVEWESNGQPENNYKTTPPVLDSDGSFFLYSKLTVDKSRWQQGNVFSCSVMHEALHNHYTQKSLSLSPGGGGSGGGGSGGGGSGGGGSGGGGSGGGGSDKTHTCPPCPAPELLGGPSVFLFPPKPKDTLMISRTPEVTCVVVDVSHEDPEVKFNWYVDGVEVHNAKTKPCEEQYGSTYRCVSVLTVLHQDWLNGKEYKCKVSNKALPAPIEKTISKAKGQPREPQVYTLPPSREEMTKNQVSLTCLVKGFYPSDIAVEWESNGQPENNYKTTPPVLDSDGSFFLYSKLTVDKSRWQQGNVFSCSVMHEALHNHYTQKSLSLSPGK

SEQ ID NO: 56 - protein, 122 aa, Artificial Sequence
  Synthetic peptide
QVQLVQSGAEVKKPGESVKVSCKASGYTFTNYGMNWVKQAPGQCLEWMGWINTYTGEPTYADKFQGRVTMTTDTSTSTAYMEIRNLGGDDTAVYYCARWSWSDGYYVYFDYWGQGTSVTVSS

SEQ ID NO: 57 - protein, 113 aa, Artificial Sequence
  Synthetic peptide
DIVMTQSPDSLTVSLGERTTINCKSSQSVLDSSTNKNSLAWYQQKPGQPPKLLLSWASTRESGIPDRFSGSGSGTDFTLTIDSPQPEDSATYYCQQSAHFPITFGCGTRLEIK

SEQ ID NO: 58 - protein, 250 aa, Artificial Sequence
  Synthetic peptide
QVQLVQSGAEVKKPGESVKVSCKASGYTFTNYGMNWVKQAPGQCLEWMGWINTYTGEPTYADKFQGRVTMTTDTSTSTAYMEIRNLGGDDTAVYYCARWSWSDGYYVYFDYWGQGTSVTVSSGGGGSGGGGSGGGGSDIVMTQSPDSLTVSLGERTTINCKSSQSVLDSSTNKNSLAWYQQKPGQPPKLLLSWASTRESGIPDRFSGSGSGTDFTLTIDSPQPEDSATYYCQQSAHFPITFGCGTRLEIK

SEQ ID NO: 59 - protein, 505 aa, Artificial Sequence
  Synthetic peptide
QVQLVQSGAEVKKPGESVKVSCKASGYTFTNYGMNWVKQAPGQCLEWMGWINTYTGEPTYADKFQGRVTMTTDTSTSTAYMEIRNLGGDDTAVYYCARWSWSDGYYVYFDYWGQGTSVTVSSGGGGSGGGGSGGGGSDIVMTQSPDSLTVSLGERTTINCKSSQSVLDSSTNKNSLAWYQQKPGQPPKLLLSWASTRESGIPDRFSGSGSGTDFTLTIDSPQPEDSATYYCQQSAHFPITFGCGTRLEIKSGGGGSEVQLVESGGGLVQPGGSLKLSCAASGFTFNKYAMNWVRQAPGKGLEWVARIRSKYNNYATYYADSVKDRFTISRDDSKNTAYLQMNNLKTEDTAVYYCVRHGNFGNSYISYWAYWGQGTLVTVSSGGGGSGGGGSGGGGSQTVVTQEPSLTVSPGGTVTLTCGSSTGAVTSGNYPNWVQQKPGQAPRGLIGGTKFLAPGTPARFSGSLLGGKAALTLSGVQPEDEAEYYCVLWYSNRWVFGGGTKLTVL

SEQ ID NO: 60 - protein, 993 aa, Artificial Sequence; identical to SEQ ID NO: 42
  Synthetic peptide

SEQ ID NO: 61 - protein, 991 aa, Artificial Sequence
  Synthetic peptide
QVQLVQSGAEVKKPGESVKVSCKASGYTFTNYGMNWVKQAPGQCLEWMGWINTYTGEPTYADKFQGRVTMTTDTSTSTAYMEIRNLGGDDTAVYYCARWSWSDGYYVYFDYWGQGTSVTVSSGGGGSGGGGSGGGGSDIVMTQSPDSLTVSLGERTTINCKSSQSVLDSSTNKNSLAWYQQKPGQPPKLLLSWASTRESGIPDRFSGSGSGTDFTLTIDSPQPEDSATYYCQQSAHFPITFGCGTRLEIKSGGGGSEVQLVESGGGLVQPGGSLKLSCAASGFTFNKYAMNWVRQAPGKGLEWVARIRSKYNNYATYYADSVKDRFTISRDDSKNTAYLQMNNLKTEDTAVYYCVRHGNFGNSYISYWAYWGQGTLVTVSSGGGGSGGGGSGGGGSQTVVTQEPSLTVSPGGTVTLTCGSSTGAVTSGNYPNWVQQKPGQAPRGLIGGTKFLAPGTPARFSGSLLGGKAALTLSGVQPEDEAEYYCVLWYSNRWVFGGGTKLTVLGGGGDKTHTCPPCPAPELLGGPSVFLFPPKPKDTLMISRTPEVTCVVVDVSHEDPEVKFNWYVDGVEVHNAKTKPCEEQYGSTYRCVSVLTVLHQDWLNGKEYKCKVSNKALPAPIEKTISKAKGQPREPQVYTLPPSREEMTKNQVSLTCLVKGFYPSDIAVEWESNGQPENNYKTTPPVLDSDGSFFLYSKLTVDKSRWQQGNVFSCSVMHEALHNHYTQKSLSLSPGGGGSGGGGSGGGGSGGGGSGGGGSGGGGSDKTHTCPPCPAPELLGGPSVFLFPPKPKDTLMISRTPEVTCVVVDVSHEDPEVKFNWYVDGVEVHNAKTKPCEEQYGSTYRCVSVLTVLHQDWLNGKEYKCKVSNKALPAPIEKTISKAKGQPREPQVYTLPPSREEMTKNQVSLTCLVKGFYPSDIAVEWESNGQPENNYKTTPPVLDSDGSFFLYSKLTVDKSRWQQGNVFSCSVMHEALHNHYTQKSLSLSPGK

SEQ ID NO: 62 - protein, 5 aa, Artificial Sequence
  Synthetic peptide
NYGMH

SEQ ID NO: 63 - protein, 17 aa, Artificial Sequence
  Synthetic peptide
VIWYDGSDKYYADSVRG

SEQ ID NO: 64 - protein, 15 aa, Artificial Sequence
  Synthetic peptide
DGYDILTGNPRDFDY

SEQ ID NO: 65 - protein, 16 aa, Artificial Sequence
  Synthetic peptide
RSSQSLVHSDGNTYLS

SEQ ID NO: 66 - protein, 7 aa, Artificial Sequence
  Synthetic peptide
RISRRFS

SEQ ID NO: 67 - protein, 9 aa, Artificial Sequence
  Synthetic peptide
MQSTHVPRT

SEQ ID NO: 68 - protein, 124 aa, Artificial Sequence
  Synthetic peptide
QVQLVESGGGVVQSGRSLRLSCAASGFTFRNYGMHWVRQAPGKGLEWVAVIWYDGSDKYYADSVRGRFTISRDNSKNTLYLQMNSLRAEDTAVYYCARDGYDILTGNPRDFDYWGQGTLVTVSS

SEQ ID NO: 69 - protein, 112 aa, Artificial Sequence
  Synthetic peptide
DTVMTQTPLSSHVTLGQPASISCRSSQSLVHSDGNTYLSWLQQRPGQPPRLLIYRISRRFSGVPDRFSGSGAGTDFTLEISRVEAEDVGVYYCMQSTHVPRTFGQGTKVEIK

SEQ ID NO: 70 - protein, 251 aa, Artificial Sequence
  Synthetic peptide
QVQLVESGGGVVQSGRSLRLSCAASGFTFRNYGMHWVRQAPGKGLEWVAVIWYDGSDKYYADSVRGRFTISRDNSKNTLYLQMNSLRAEDTAVYYCARDGYDILTGNPRDFDYWGQGTLVTVSSGGGGSGGGGSGGGGSDTVMTQTPLSSHVTLGQPASISCRSSQSLVHSDGNTYLSWLQQRPGQPPRLLIYRISRRFSGVPDRFSGSGAGTDFTLEISRVEAEDVGVYYCMQSTHVPRTFGQGTKVEIK

SEQ ID NO: 71 - protein, 506 aa, Artificial Sequence
  Synthetic peptide
QVQLVESGGGVVQSGRSLRLSCAASGFTFRNYGMHWVRQAPGKGLEWVAVIWYDGSDKYYADSVRGRFTISRDNSKNTLYLQMNSLRAEDTAVYYCARDGYDILTGNPRDFDYWGQGTLVTVSSGGGGSGGGGSGGGGSDTVMTQTPLSSHVTLGQPASISCRSSQSLVHSDGNTYLSWLQQRPGQPPRLLIYRISRRFSGVPDRFSGSGAGTDFTLEISRVEAEDVGVYYCMQSTHVPRTFGQGTKVEIKSGGGGSEVQLVESGGGLVQPGGSLKLSCAASGFTFNKYAMNWVRQAPGKGLEWVARIRSKYNNYATYYADSVKDRFTISRDDSKNTAYLQMNNLKTEDTAVYYCVRHGNFGNSYISYWAYWGQGTLVTVSSGGGGSGGGGSGGGGSQTVVTQEPSLTVSPGGTVTLTCGSSTGAVTSGNYPNWVQQKPGQAPRGLIGGTKFLAPGTPARFSGSLLGGKAALTLSGVQPEDEAEYYCVLWYSNRWVFGGGTKLTVL

SEQ ID NO: 72 - protein, 994 aa, Artificial Sequence
  Synthetic peptide
QVQLVESGGGVVQSGRSLRLSCAASGFTFRNYGMHWVRQAPGKGLEWVAVIWYDGSDKYYADSVRGRFTISRDNSKNTLYLQMNSLRAEDTAVYYCARDGYDILTGNPRDFDYWGQGTLVTVSSGGGGSGGGGSGGGGSDTVMTQTPLSSHVTLGQPASISCRSSQSLVHSDGNTYLSWLQQRPGQPPRLLIYRISRRFSGVPDRFSGSGAGTDFTLEISRVEAEDVGVYYCMQSTHVPRTFGQGTKVEIKSGGGGSEVQLVESGGGLVQPGGSLKLSCAASGFTFNKYAMNWVRQAPGKGLEWVARIRSKYNNYATYYADSVKDRFTISRDDSKNTAYLQMNNLKTEDTAVYYCVRHGNFGNSYISYWAYWGQGTLVTVSSGGGGSGGGGSGGGGSQTVVTQEPSLTVSPGGTVTLTCGSSTGAVTSGNYPNWVQQKPGQAPRGLIGGTKFLAPGTPARFSGSLLGGKAALTLSGVQPEDEAEYYCVLWYSNRWVFGGGTKLTVLGGGGDKTHTCPPCPAPELLGGPSVFLFPPKPKDTLMISRTPEVTCVVVDVSHEDPEVKFNWYVDGVEVHNAKTKPCEEQYGSTYRCVSVLTVLHQDWLNGKEYKCKVSNKALPAPIEKTISKAKGQPREPQVYTLPPSREEMTKNQVSLTCLVKGFYPSDIAVEWESNGQPENNYKTTPPVLDSDGSFFLYSKLTVDKSRWQQGNVFSCSVMHEALHNHYTQKSLSLSPGKGGGGSGGGGSGGGGSGGGGSGGGGSGGGGSDKTHTCPPCPAPELLGGPSVFLFPPKPKDTLMISRTPEVTCVVVDVSHEDPEVKFNWYVDGVEVHNAKTKPCEEQYGSTYRCVSVLTVLHQDWLNGKEYKCKVSNKALPAPIEKTISKAKGQPREPQVYTLPPSREEMTKNQVSLTCLVKGFYPSDIAVEWESNGQPENNYKTTPPVLDSDGSFFLYSKLTVDKSRWQQGNVFSCSVMHEALHNHYTQKSLSLSPGK

SEQ ID NO: 73 - protein, 992 aa, Artificial Sequence
  Synthetic peptide
QVQLVESGGGVVQSGRSLRLSCAASGFTFRNYGMHWVRQAPGKGLEWVAVIWYDGSDKYYADSVRGRFTISRDNSKNTLYLQMNSLRAEDTAVYYCARDGYDILTGNPRDFDYWGQGTLVTVSSGGGGSGGGGSGGGGSDTVMTQTPLSSHVTLGQPASISCRSSQSLVHSDGNTYLSWLQQRPGQPPRLLIYRISRRFSGVPDRFSGSGAGTDFTLEISRVEAEDVGVYYCMQSTHVPRTFGQGTKVEIKSGGGGSEVQLVESGGGLVQPGGSLKLSCAASGFTFNKYAMNWVRQAPGKGLEWVARIRSKYNNYATYYADSVKDRFTISRDDSKNTAYLQMNNLKTEDTAVYYCVRHGNFGNSYISYWAYWGQGTLVTVSSGGGGSGGGGSGGGGSQTVVTQEPSLTVSPGGTVTLTCGSSTGAVTSGNYPNWVQQKPGQAPRGLIGGTKFLAPGTPARFSGSLLGGKAALTLSGVQPEDEAEYYCVLWYSNRWVFGGGTKLTVLGGGGDKTHTCPPCPAPELLGGPSVFLFPPKPKDTLMISRTPEVTCVVVDVSHEDPEVKFNWYVDGVEVHNAKTKPCEEQYGSTYRCVSVLTVLHQDWLNGKEYKCKVSNKALPAPIEKTISKAKGQPREPQVYTLPPSREEMTKNQVSLTCLVKGFYPSDIAVEWESNGQPENNYKTTPPVLDSDGSFFLYSKLTVDKSRWQQGNVFSCSVMHEALHNHYTQKSLSLSPGGGGSGGGGSGGGGSGGGGSGGGGSGGGGSDKTHTCPPCPAPELLGGPSVFLFPPKPKDTLMISRTPEVTCVVVDVSHEDPEVKFNWYVDGVEVHNAKTKPCEEQYGSTYRCVSVLTVLHQDWLNGKEYKCKVSNKALPAPIEKTISKAKGQPREPQVYTLPPSREEMTKNQVSLTCLVKGFYPSDIAVEWESNGQPENNYKTTPPVLDSDGSFFLYSKLTVDKSRWQQGNVFSCSVMHEALHNHYTQKSLSLSPGK

SEQ ID NO: 74 - protein, 124 aa, Artificial Sequence
  Synthetic peptide
QVQLVESGGGVVQSGRSLRLSCAASGFTFRNYGMHWVRQAPGKCLEWVAVIWYDGSDKYYADSVRGRFTISRDNSKNTLYLQMNSLRAEDTAVYYCARDGYDILTGNPRDFDYWGQGTLVTVSS

SEQ ID NO: 75 - protein, 112 aa, Artificial Sequence
  Synthetic peptide
DTVMTQTPLSSHVTLGQPASISCRSSQSLVHSDGNTYLSWLQQRPGQPPRLLIYRISRRFSGVPDRFSGSGAGTDFTLEISRVEAEDVGVYYCMQSTHVPRTFGCGTKVEIK

SEQ ID NO: 76 - protein, 251 aa, Artificial Sequence
  Synthetic peptide
QVQLVESGGGVVQSGRSLRLSCAASGFTFRNYGMHWVRQAPGKCLEWVAVIWYDGSDKYYADSVRGRFTISRDNSKNTLYLQMNSLRAEDTAVYYCARDGYDILTGNPRDFDYWGQGTLVTVSSGGGGSGGGGSGGGGSDTVMTQTPLSSHVTLGQPASISCRSSQSLVHSDGNTYLSWLQQRPGQPPRLLIYRISRRFSGVPDRFSGSGAGTDFTLEISRVEAEDVGVYYCMQSTHVPRTFGCGTKVEIK

SEQ ID NO: 77 - protein, 506 aa, Artificial Sequence
  Synthetic peptide
QVQLVESGGGVVQSGRSLRLSCAASGFTFRNYGMHWVRQAPGKCLEWVAVIWYDGSDKYYADSVRGRFTISRDNSKNTLYLQMNSLRAEDTAVYYCARDGYDILTGNPRDFDYWGQGTLVTVSSGGGGSGGGGSGGGGSDTVMTQTPLSSHVTLGQPASISCRSSQSLVHSDGNTYLSWLQQRPGQPPRLLIYRISRRFSGVPDRFSGSGAGTDFTLEISRVEAEDVGVYYCMQSTHVPRTFGCGTKVEIKSGGGGSEVQLVESGGGLVQPGGSLKLSCAASGFTFNKYAMNWVRQAPGKGLEWVARIRSKYNNYATYYADSVKDRFTISRDDSKNTAYLQMNNLKTEDTAVYYCVRHGNFGNSYISYWAYWGQGTLVTVSSGGGGSGGGGSGGGGSQTVVTQEPSLTVSPGGTVTLTCGSSTGAVTSGNYPNWVQQKPGQAPRGLIGGTKFLAPGTPARFSGSLLGGKAALTLSGVQPEDEAEYYCVLWYSNRWVFGGGTKLTVL

SEQ ID NO: 78 - protein, 994 aa, Artificial Sequence
  Synthetic peptide
QVQLVESGGGVVQSGRSLRLSCAASGFTFRNYGMHWVRQAPGKCLEWVAVIWYDGSDKYYADSVRGRFTISRDNSKNTLYLQMNSLRAEDTAVYYCARDGYDILTGNPRDFDYWGQGTLVTVSSGGGGSGGGGSGGGGSDTVMTQTPLSSHVTLGQPASISCRSSQSLVHSDGNTYLSWLQQRPGQPPRLLIYRISRRFSGVPDRFSGSGAGTDFTLEISRVEAEDVGVYYCMQSTHVPRTFGCGTKVEIKSGGGGSEVQLVESGGGLVQPGGSLKLSCAASGFTFNKYAMNWVRQAPGKGLEWVARIRSKYNNYATYYADSVKDRFTISRDDSKNTAYLQMNNLKTEDTAVYYCVRHGNFGNSYISYWAYWGQGTLVTVSSGGGGSGGGGSGGGGSQTVVTQEPSLTVSPGGTVTLTCGSSTGAVTSGNYPNWVQQKPGQAPRGLIGGTKFLAPGTPARFSGSLLGGKAALTLSGVQPEDEAEYYCVLWYSNRWVFGGGTKLTVLGGGGDKTHTCPPCPAPELLGGPSVFLFPPKPKDTLMISRTPEVTCVVVDVSHEDPEVKFNWYVDGVEVHNAKTKPCEEQYGSTYRCVSVLTVLHQDWLNGKEYKCKVSNKALPAPIEKTISKAKGQPREPQVYTLPPSREEMTKNQVSLTCLVKGFYPSDIAVEWESNGQPENNYKTTPPVLDSDGSFFLYSKLTVDKSRWQQGNVFSCSVMHEALHNHYTQKSLSLSPGKGGGGSGGGGSGGGGSGGGGSGGGGSGGGGSDKTHTCPPCPAPELLGGPSVFLFPPKPKDTLMISRTPEVTCVVVDVSHEDPEVKFNWYVDGVEVHNAKTKPCEEQYGSTYRCVSVLTVLHQDWLNGKEYKCKVSNKALPAPIEKTISKAKGQPREPQVYTLPPSREEMTKNQVSLTCLVKGFYPSDIAVEWESNGQPENNYKTTPPVLDSDGSFFLYSKLTVDKSRWQQGNVFSCSVMHEALHNHYTQKSLSLSPGK

SEQ ID NO: 79 - protein, 992 aa, Artificial Sequence
  Synthetic peptide
QVQLVESGGGVVQSGRSLRLSCAASGFTFRNYGMHWVRQAPGKCLEWVAVIWYDGSDKYYADSVRGRFTISRDNSKNTLYLQMNSLRAEDTAVYYCARDGYDILTGNPRDFDYWGQGTLVTVSSGGGGSGGGGSGGGGSDTVMTQTPLSSHVTLGQPASISCRSSQSLVHSDGNTYLSWLQQRPGQPPRLLIYRISRRFSGVPDRFSGSGAGTDFTLEISRVEAEDVGVYYCMQSTHVPRTFGCGTKVEIKSGGGGSEVQLVESGGGLVQPGGSLKLSCAASGFTFNKYAMNWVRQAPGKGLEWVARIRSKYNNYATYYADSVKDRFTISRDDSKNTAYLQMNNLKTEDTAVYYCVRHGNFGNSYISYWAYWGQGTLVTVSSGGGGSGGGGSGGGGSQTVVTQEPSLTVSPGGTVTLTCGSSTGAVTSGNYPNWVQQKPGQAPRGLIGGTKFLAPGTPARFSGSLLGGKAALTLSGVQPEDEAEYYCVLWYSNRWVFGGGTKLTVLGGGGDKTHTCPPCPAPELLGGPSVFLFPPKPKDTLMISRTPEVTCVVVDVSHEDPEVKFNWYVDGVEVHNAKTKPCEEQYGSTYRCVSVLTVLHQDWLNGKEYKCKVSNKALPAPIEKTISKAKGQPREPQVYTLPPSREEMTKNQVSLTCLVKGFYPSDIAVEWESNGQPENNYKTTPPVLDSDGSFFLYSKLTVDKSRWQQGNVFSCSVMHEALHNHYTQKSLSLSPGGGGSGGGGSGGGGSGGGGSGGGGSGGGGSDKTHTCPPCPAPELLGGPSVFLFPPKPKDTLMISRTPEVTCVVVDVSHEDPEVKFNWYVDGVEVHNAKTKPCEEQYGSTYRCVSVLTVLHQDWLNGKEYKCKVSNKALPAPIEKTISKAKGQPREPQVYTLPPSREEMTKNQVSLTCLVKGFYPSDIAVEWESNGQPENNYKTTPPVLDSDGSFFLYSKLTVDKSRWQQGNVFSCSVMHEALHNHYTQKSLSLSPGK

SEQ ID NO: 80 - protein, 5 aa, Artificial Sequence
  Synthetic peptide
DYYMT

SEQ ID NO: 81 - protein, 17 aa, Artificial Sequence
  Synthetic peptide
YISSSGSTIYYADSVKG

SEQ ID NO: 82 - protein, 8 aa, Artificial Sequence
  Synthetic peptide
DRNSHFDY

SEQ ID NO: 83 - protein, 11 aa, Artificial Sequence
  Synthetic peptide
RASQGINTWLA

SEQ ID NO: 84 - protein, 7 aa, Artificial Sequence
  Synthetic peptide
GASGLQS

SEQ ID NO: 85 - protein, 9 aa, Artificial Sequence
  Synthetic peptide
QQAKSFPRT

SEQ ID NO: 86 - protein, 117 aa, Artificial Sequence
  Synthetic peptide
QVQLVESGGGLVKPGGSLRLSCAASGFTFSDYYMTWIRQAPGKGLEWLSYISSSGSTIYYADSVKGRFTISRDNAKNSLFLQMNSLRAEDTAVYYCARDRNSHFDYWGQGTLVTVSS

SEQ ID NO: 87 - protein, 107 aa, Artificial Sequence
  Synthetic peptide
DIQMTQSPSSVSASVGDRVTITCRASQGINTWLAWYQQKPGKAPKLLIYGASGLQSGVPSRFSGSGSGTDFTLTISSLQPEDFATYYCQQAKSFPRTFGQGTKVEIK

SEQ ID NO: 88 - protein, 239 aa, Artificial Sequence
  Synthetic peptide
QVQLVESGGGLVKPGGSLRLSCAASGFTFSDYYMTWIRQAPGKGLEWLSYISSSGSTIYYADSVKGRFTISRDNAKNSLFLQMNSLRAEDTAVYYCARDRNSHFDYWGQGTLVTVSSGGGGSGGGGSGGGGSDIQMTQSPSSVSASVGDRVTITCRASQGINTWLAWYQQKPGKAPKLLIYGASGLQSGVPSRFSGSGSGTDFTLTISSLQPEDFATYYCQQAKSFPRTFGQGTKVEIK

SEQ ID NO: 89 - protein, 494 aa, Artificial Sequence
  Synthetic peptide
QVQLVESGGGLVKPGGSLRLSCAASGFTFSDYYMTWIRQAPGKGLEWLSYISSSGSTIYYADSVKGRFTISRDNAKNSLFLQMNSLRAEDTAVYYCARDRNSHFDYWGQGTLVTVSSGGGGSGGGGSGGGGSDIQMTQSPSSVSASVGDRVTITCRASQGINTWLAWYQQKPGKAPKLLIYGASGLQSGVPSRFSGSGSGTDFTLTISSLQPEDFATYYCQQAKSFPRTFGQGTKVEIKSGGGGSEVQLVESGGGLVQPGGSLKLSCAASGFTFNKYAMNWVRQAPGKGLEWVARIRSKYNNYATYYADSVKDRFTISRDDSKNTAYLQMNNLKTEDTAVYYCVRHGNFGNSYISYWAYWGQGTLVTVSSGGGGSGGGGSGGGGSQTVVTQEPSLTVSPGGTVTLTCGSSTGAVTSGNYPNWVQQKPGQAPRGLIGGTKFLAPGTPARFSGSLLGGKAALTLSGVQPEDEAEYYCVLWYSNRWVFGGGTKLTVL

SEQ ID NO: 90 - protein, 982 aa, Artificial Sequence
  Synthetic peptide
QVQLVESGGGLVKPGGSLRLSCAASGFTFSDYYMTWIRQAPGKGLEWLSYISSSGSTIYYADSVKGRFTISRDNAKNSLFLQMNSLRAEDTAVYYCARDRNSHFDYWGQGTLVTVSSGGGGSGGGGSGGGGSDIQMTQSPSSVSASVGDRVTITCRASQGINTWLAWYQQKPGKAPKLLIYGASGLQSGVPSRFSGSGSGTDFTLTISSLQPEDFATYYCQQAKSFPRTFGQGTKVEIKSGGGGSEVQLVESGGGLVQPGGSLKLSCAASGFTFNKYAMNWVRQAPGKGLEWVARIRSKYNNYATYYADSVKDRFTISRDDSKNTAYLQMNNLKTEDTAVYYCVRHGNFGNSYISYWAYWGQGTLVTVSSGGGGSGGGGSGGGGSQTVVTQEPSLTVSPGGTVTLTCGSSTGAVTSGNYPNWVQQKPGQAPRGLIGGTKFLAPGTPARFSGSLLGGKAALTLSGVQPEDEAEYYCVLWYSNRWVFGGGTKLTVLGGGGDKTHTCPPCPAPELLGGPSVFLFPPKPKDTLMISRTPEVTCVVVDVSHEDPEVKFNWYVDGVEVHNAKTKPCEEQYGSTYRCVSVLTVLHQDWLNGKEYKCKVSNKALPAPIEKTISKAKGQPREPQVYTLPPSREEMTKNQVSLTCLVKGFYPSDIAVEWESNGQPENNYKTTPPVLDSDGSFFLYSKLTVDKSRWQQGNVFSCSVMHEALHNHYTQKSLSLSPGKGGGGSGGGGSGGGGSGGGGSGGGGSGGGGSDKTHTCPPCPAPELLGGPSVFLFPPKPKDTLMISRTPEVTCVVVDVSHEDPEVKFNWYVDGVEVHNAKTKPCEEQYGSTYRCVSVLTVLHQDWLNGKEYKCKVSNKALPAPIEKTISKAKGQPREPQVYTLPPSREEMTKNQVSLTCLVKGFYPSDIAVEWESNGQPENNYKTTPPVLDSDGSFFLYSKLTVDKSRWQQGNVFSCSVMHEALHNHYTQKSLSLSPGK

SEQ ID NO: 91 - protein, 980 aa, Artificial Sequence
  Synthetic peptide
QVQLVESGGGLVKPGGSLRLSCAASGFTFSDYYMTWIRQAPGKGLEWLSYISSSGSTIYYADSVKGRFTISRDNAKNSLFLQMNSLRAEDTAVYYCARDRNSHFDYWGQGTLVTVSSGGGGSGGGGSGGGGSDIQMTQSPSSVSASVGDRVTITCRASQGINTWLAWYQQKPGKAPKLLIYGASGLQSGVPSRFSGSGSGTDFTLTISSLQPEDFATYYCQQAKSFPRTFGQGTKVEIKSGGGGSEVQLVESGGGLVQPGGSLKLSCAASGFTFNKYAMNWVRQAPGKGLEWVARIRSKYNNYATYYADSVKDRFTISRDDSKNTAYLQMNNLKTEDTAVYYCVRHGNFGNSYISYWAYWGQGTLVTVSSGGGGSGGGGSGGGGSQTVVTQEPSLTVSPGGTVTLTCGSSTGAVTSGNYPNWVQQKPGQAPRGLIGGTKFLAPGTPARFSGSLLGGKAALTLSGVQPEDEAEYYCVLWYSNRWVFGGGTKLTVLGGGGDKTHTCPPCPAPELLGGPSVFLFPPKPKDTLMISRTPEVTCVVVDVSHEDPEVKFNWYVDGVEVHNAKTKPCEEQYGSTYRCVSVLTVLHQDWLNGKEYKCKVSNKALPAPIEKTISKAKGQPREPQVYTLPPSREEMTKNQVSLTCLVKGFYPSDIAVEWESNGQPENNYKTTPPVLDSDGSFFLYSKLTVDKSRWQQGNVFSCSVMHEALHNHYTQKSLSLSPGGGGSGGGGSGGGGSGGGGSGGGGSGGGGSDKTHTCPPCPAPELLGGPSVFLFPPKPKDTLMISRTPEVTCVVVDVSHEDPEVKFNWYVDGVEVHNAKTKPCEEQYGSTYRCVSVLTVLHQDWLNGKEYKCKVSNKALPAPIEKTISKAKGQPREPQVYTLPPSREEMTKNQVSLTCLVKGFYPSDIAVEWESNGQPENNYKTTPPVLDSDGSFFLYSKLTVDKSRWQQGNVFSCSVMHEALHNHYTQKSLSLSPGK

SEQ ID NO: 92 - protein, 117 aa, Artificial Sequence
  Synthetic peptide
QVQLVESGGGLVKPGGSLRLSCAASGFTFSDYYMTWIRQAPGKCLEWLSYISSSGSTIYYADSVKGRFTISRDNAKNSLFLQMNSLRAEDTAVYYCARDRNSHFDYWGQGTLVTVSS

SEQ ID NO: 93 - protein, 107 aa, Artificial Sequence
  Synthetic peptide
DIQMTQSPSSVSASVGDRVTITCRASQGINTWLAWYQQKPGKAPKLLIYGASGLQSGVPSRFSGSGSGTDFTLTISSLQPEDFATYYCQQAKSFPRTFGCGTKVEIK

SEQ ID NO: 94 - protein, 239 aa, Artificial Sequence
  Synthetic peptide
QVQLVESGGGLVKPGGSLRLSCAASGFTFSDYYMTWIRQAPGKCLEWLSYISSSGSTIYYADSVKGRFTISRDNAKNSLFLQMNSLRAEDTAVYYCARDRNSHFDYWGQGTLVTVSSGGGGSGGGGSGGGGSDIQMTQSPSSVSASVGDRVTITCRASQGINTWLAWYQQKPGKAPKLLIYGASGLQSGVPSRFSGSGSGTDFTLTISSLQPEDFATYYCQQAKSFPRTFGCGTKVEIK

SEQ ID NO: 95 - protein, 494 aa, Artificial Sequence
  Synthetic peptide
QVQLVESGGGLVKPGGSLRLSCAASGFTFSDYYMTWIRQAPGKCLEWLSYISSSGSTIYYADSVKGRFTISRDNAKNSLFLQMNSLRAEDTAVYYCARDRNSHFDYWGQGTLVTVSSGGGGSGGGGSGGGGSDIQMTQSPSSVSASVGDRVTITCRASQGINTWLAWYQQKPGKAPKLLIYGASGLQSGVPSRFSGSGSGTDFTLTISSLQPEDFATYYCQQAKSFPRTFGCGTKVEIKSGGGGSEVQLVESGGGLVQPGGSLKLSCAASGFTFNKYAMNWVRQAPGKGLEWVARIRSKYNNYATYYADSVKDRFTISRDDSKNTAYLQMNNLKTEDTAVYYCVRHGNFGNSYISYWAYWGQGTLVTVSSGGGGSGGGGSGGGGSQTVVTQEPSLTVSPGGTVTLTCGSSTGAVTSGNYPNWVQQKPGQAPRGLIGGTKFLAPGTPARFSGSLLGGKAALTLSGVQPEDEAEYYCVLWYSNRWVFGGGTKLTVL

SEQ ID NO: 96 - protein, 982 aa, Artificial Sequence
  Synthetic peptide
QVQLVESGGGLVKPGGSLRLSCAASGFTFSDYYMTWIRQAPGKCLEWLSYISSSGSTIYYADSVKGRFTISRDNAKNSLFLQMNSLRAEDTAVYYCARDRNSHFDYWGQGTLVTVSSGGGGSGGGGSGGGGSDIQMTQSPSSVSASVGDRVTITCRASQGINTWLAWYQQKPGKAPKLLIYGASGLQSGVPSRFSGSGSGTDFTLTISSLQPEDFATYYCQQAKSFPRTFGCGTKVEIKSGGGGSEVQLVESGGGLVQPGGSLKLSCAASGFTFNKYAMNWVRQAPGKGLEWVARIRSKYNNYATYYADSVKDRFTISRDDSKNTAYLQMNNLKTEDTAVYYCVRHGNFGNSYISYWAYWGQGTLVTVSSGGGGSGGGGSGGGGSQTVVTQEPSLTVSPGGTVTLTCGSSTGAVTSGNYPNWVQQKPGQAPRGLIGGTKFLAPGTPARFSGSLLGGKAALTLSGVQPEDEAEYYCVLWYSNRWVFGGGTKLTVLGGGGDKTHTCPPCPAPELLGGPSVFLFPPKPKDTLMISRTPEVTCVVVDVSHEDPEVKFNWYVDGVEVHNAKTKPCEEQYGSTYRCVSVLTVLHQDWLNGKEYKCKVSNKALPAPIEKTISKAKGQPREPQVYTLPPSREEMTKNQVSLTCLVKGFYPSDIAVEWESNGQPENNYKTTPPVLDSDGSFFLYSKLTVDKSRWQQGNVFSCSVMHEALHNHYTQKSLSLSPGKGGGGSGGGGSGGGGSGGGGSGGGGSGGGGSDKTHTCPPCPAPELLGGPSVFLFPPKPKDTLMISRTPEVTCVVVDVSHEDPEVKFNWYVDGVEVHNAKTKPCEEQYGSTYRCVSVLTVLHQDWLNGKEYKCKVSNKALPAPIEKTISKAKGQPREPQVYTLPPSREEMTKNQVSLTCLVKGFYPSDIAVEWESNGQPENNYKTTPPVLDSDGSFFLYSKLTVDKSRWQQGNVFSCSVMHEALHNHYTQKSLSLSPGK

SEQ ID NO: 97 - protein, 980 aa, Artificial Sequence
  Synthetic peptide
QVQLVESGGGLVKPGGSLRLSCAASGFTFSDYYMTWIRQAPGKCLEWLSYISSSGSTIYYADSVKGRFTISRDNAKNSLFLQMNSLRAEDTAVYYCARDRNSHFDYWGQGTLVTVSSGGGGSGGGGSGGGGSDIQMTQSPSSVSASVGDRVTITCRASQGINTWLAWYQQKPGKAPKLLIYGASGLQSGVPSRFSGSGSGTDFTLTISSLQPEDFATYYCQQAKSFPRTFGCGTKVEIKSGGGGSEVQLVESGGGLVQPGGSLKLSCAASGFTFNKYAMNWVRQAPGKGLEWVARIRSKYNNYATYYADSVKDRFTISRDDSKNTAYLQMNNLKTEDTAVYYCVRHGNFGNSYISYWAYWGQGTLVTVSSGGGGSGGGGSGGGGSQTVVTQEPSLTVSPGGTVTLTCGSSTGAVTSGNYPNWVQQKPGQAPRGLIGGTKFLAPGTPARFSGSLLGGKAALTLSGVQPEDEAEYYCVLWYSNRWVFGGGTKLTVLGGGGDKTHTCPPCPAPELLGGPSVFLFPPKPKDTLMISRTPEVTCVVVDVSHEDPEVKFNWYVDGVEVHNAKTKPCEEQYGSTYRCVSVLTVLHQDWLNGKEYKCKVSNKALPAPIEKTISKAKGQPREPQVYTLPPSREEMTKNQVSLTCLVKGFYPSDIAVEWESNGQPENNYKTTPPVLDSDGSFFLYSKLTVDKSRWQQGNVFSCSVMHEALHNHYTQKSLSLSPGGGGSGGGGSGGGGSGGGGSGGGGSGGGGSDKTHTCPPCPAPELLGGPSVFLFPPKPKDTLMISRTPEVTCVVVDVSHEDPEVKFNWYVDGVEVHNAKTKPCEEQYGSTYRCVSVLTVLHQDWLNGKEYKCKVSNKALPAPIEKTISKAKGQPREPQVYTLPPSREEMTKNQVSLTCLVKGFYPSDIAVEWESNGQPENNYKTTPPVLDSDGSFFLYSKLTVDKSRWQQGNVFSCSVMHEALHNHYTQKSLSLSPGK

SEQ ID NO: 98 - protein, 5 aa, Artificial Sequence
  Synthetic peptide
DYYMT

SEQ ID NO: 99 - protein, 17 aa, Artificial Sequence
  Synthetic peptide
YISSSGSTIYYADSVKG

SEQ ID NO: 100 - protein, 8 aa, Artificial Sequence
  Synthetic peptide
DRNSHFDY

SEQ ID NO: 101 - protein, 11 aa, Artificial Sequence
  Synthetic peptide
RASQGITRWLA

SEQ ID NO: 102 - protein, 7 aa, Artificial Sequence
  Synthetic peptide
AASVLQS

SEQ ID NO: 103 - protein, 9 aa, Artificial Sequence
  Synthetic peptide
QQSNSFPRT

SEQ ID NO: 104 - protein, 117 aa, Artificial Sequence
  Synthetic peptide
QVQLVESGGGLVKPGGSLRLSCAASGFTFSDYYMTWIRQAPGKGLEWISYISSSGSTIYYADSVKGRFTISRDNAKNSLYLQMNSLRAEDTAVYYCARDRNSHFDYWGQGTLVTVSS

SEQ ID NO: 105 - protein, 107 aa, Artificial Sequence
  Synthetic peptide
DIQMTQSPSSVSASVGDRVTITCRASQGITRWLAWYQQKPGKAPKLLIYAASVLQSGVPSRFSGSGSGTDFTLTISSLQPEDFATYYCQQSNSFPRTFGQGTKVEIK

SEQ ID NO: 106 - protein, 239 aa, Artificial Sequence
  Synthetic peptide
QVQLVESGGGLVKPGGSLRLSCAASGFTFSDYYMTWIRQAPGKGLEWISYISSSGSTIYYADSVKGRFTISRDNAKNSLYLQMNSLRAEDTAVYYCARDRNSHFDYWGQGTLVTVSSGGGGSGGGGSGGGGSDIQMTQSPSSVSASVGDRVTITCRASQGITRWLAWYQQKPGKAPKLLIYAASVLQSGVPSRFSGSGSGTDFTLTISSLQPEDFATYYCQQSNSFPRTFGQGTKVEIK

SEQ ID NO: 107 - protein, 494 aa, Artificial Sequence
  Synthetic peptide
QVQLVESGGGLVKPGGSLRLSCAASGFTFSDYYMTWIRQAPGKGLEWISYISSSGSTIYYADSVKGRFTISRDNAKNSLYLQMNSLRAEDTAVYYCARDRNSHFDYWGQGTLVTVSSGGGGSGGGGSGGGGSDIQMTQSPSSVSASVGDRVTITCRASQGITRWLAWYQQKPGKAPKLLIYAASVLQSGVPSRFSGSGSGTDFTLTISSLQPEDFATYYCQQSNSFPRTFGQGTKVEIKSGGGGSEVQLVESGGGLVQPGGSLKLSCAASGFTFNKYAMNWVRQAPGKGLEWVARIRSKYNNYATYYADSVKDRFTISRDDSKNTAYLQMNNLKTEDTAVYYCVRHGNFGNSYISYWAYWGQGTLVTVSSGGGGSGGGGSGGGGSQTVVTQEPSLTVSPGGTVTLTCGSSTGAVTSGNYPNWVQQKPGQAPRGLIGGTKFLAPGTPARFSGSLLGGKAALTLSGVQPEDEAEYYCVLWYSNRWVFGGGTKLTVL

SEQ ID NO: 108 - protein, 982 aa, Artificial Sequence
  Synthetic peptide
QVQLVESGGGLVKPGGSLRLSCAASGFTFSDYYMTWIRQAPGKGLEWISYISSSGSTIYYADSVKGRFTISRDNAKNSLYLQMNSLRAEDTAVYYCARDRNSHFDYWGQGTLVTVSSGGGGSGGGGSGGGGSDIQMTQSPSSVSASVGDRVTITCRASQGITRWLAWYQQKPGKAPKLLIYAASVLQSGVPSRFSGSGSGTDFTLTISSLQPEDFATYYCQQSNSFPRTFGQGTKVEIKSGGGGSEVQLVESGGGLVQPGGSLKLSCAASGFTFNKYAMNWVRQAPGKGLEWVARIRSKYNNYATYYADSVKDRFTISRDDSKNTAYLQMNNLKTEDTAVYYCVRHGNFGNSYISYWAYWGQGTLVTVSSGGGGSGGGGSGGGGSQTVVTQEPSLTVSPGGTVTLTCGSSTGAVTSGNYPNWVQQKPGQAPRGLIGGTKFLAPGTPARFSGSLLGGKAALTLSGVQPEDEAEYYCVLWYSNRWVFGGGTKLTVLGGGGDKTHTCPPCPAPELLGGPSVFLFPPKPKDTLMISRTPEVTCVVVDVSHEDPEVKFNWYVDGVEVHNAKTKPCEEQYGSTYRCVSVLTVLHQDWLNGKEYKCKVSNKALPAPIEKTISKAKGQPREPQVYTLPPSREEMTKNQVSLTCLVKGFYPSDIAVEWESNGQPENNYKTTPPVLDSDGSFFLYSKLTVDKSRWQQGNVFSCSVMHEALHNHYTQKSLSLSPGKGGGGSGGGGSGGGGSGGGGSGGGGSGGGGSDKTHTCPPCPAPELLGGPSVFLFPPKPKDTLMISRTPEVTCVVVDVSHEDPEVKFNWYVDGVEVHNAKTKPCEEQYGSTYRCVSVLTVLHQDWLNGKEYKCKVSNKALPAPIEKTISKAKGQPREPQVYTLPPSREEMTKNQVSLTCLVKGFYPSDIAVEWESNGQPENNYKTTPPVLDSDGSFFLYSKLTVDKSRWQQGNVFSCSVMHEALHNHYTQKSLSLSPGK

SEQ ID NO: 109 - protein, 980 aa, Artificial Sequence
  Synthetic peptide
QVQLVESGGGLVKPGGSLRLSCAASGFTFSDYYMTWIRQAPGKGLEWISYISSSGSTIYYADSVKGRFTISRDNAKNSLYLQMNSLRAEDTAVYYCARDRNSHFDYWGQGTLVTVSSGGGGSGGGGSGGGGSDIQMTQSPSSVSASVGDRVTITCRASQGITRWLAWYQQKPGKAPKLLIYAASVLQSGVPSRFSGSGSGTDFTLTISSLQPEDFATYYCQQSNSFPRTFGQGTKVEIKSGGGGSEVQLVESGGGLVQPGGSLKLSCAASGFTFNKYAMNWVRQAPGKGLEWVARIRSKYNNYATYYADSVKDRFTISRDDSKNTAYLQMNNLKTEDTAVYYCVRHGNFGNSYISYWAYWGQGTLVTVSSGGGGSGGGGSGGGGSQTVVTQEPSLTVSPGGTVTLTCGSSTGAVTSGNYPNWVQQKPGQAPRGLIGGTKFLAPGTPARFSGSLLGGKAALTLSGVQPEDEAEYYCVLWYSNRWVFGGGTKLTVLGGGGDKTHTCPPCPAPELLGGPSVFLFPPKPKDTLMISRTPEVTCVVVDVSHEDPEVKFNWYVDGVEVHNAKTKPCEEQYGSTYRCVSVLTVLHQDWLNGKEYKCKVSNKALPAPIEKTISKAKGQPREPQVYTLPPSREEMTKNQVSLTCLVKGFYPSDIAVEWESNGQPENNYKTTPPVLDSDGSFFLYSKLTVDKSRWQQGNVFSCSVMHEALHNHYTQKSLSLSPGGGGSGGGGSGGGGSGGGGSGGGGSGGGGSDKTHTCPPCPAPELLGGPSVFLFPPKPKDTLMISRTPEVTCVVVDVSHEDPEVKFNWYVDGVEVHNAKTKPCEEQYGSTYRCVSVLTVLHQDWLNGKEYKCKVSNKALPAPIEKTISKAKGQPREPQVYTLPPSREEMTKNQVSLTCLVKGFYPSDIAVEWESNGQPENNYKTTPPVLDSDGSFFLYSKLTVDKSRWQQGNVFSCSVMHEALHNHYTQKSLSLSPGK

SEQ ID NO: 110 - protein, 117 aa, Artificial Sequence
  Synthetic peptide
QVQLVESGGGLVKPGGSLRLSCAASGFTFSDYYMTWIRQAPGKCLEWISYISSSGSTIYYADSVKGRFTISRDNAKNSLYLQMNSLRAEDTAVYYCARDRNSHFDYWGQGTLVTVSS

SEQ ID NO: 111 - protein, 107 aa, Artificial Sequence
  Synthetic peptide
DIQMTQSPSSVSASVGDRVTITCRASQGITRWLAWYQQKPGKAPKLLIYAASVLQSGVPSRFSGSGSGTDFTLTISSLQPEDFATYYCQQSNSFPRTFGCGTKVEIK

SEQ ID NO: 112 - protein, 239 aa, Artificial Sequence
  Synthetic peptide
QVQLVESGGGLVKPGGSLRLSCAASGFTFSDYYMTWIRQAPGKCLEWISYISSSGSTIYYADSVKGRFTISRDNAKNSLYLQMNSLRAEDTAVYYCARDRNSHFDYWGQGTLVTVSSGGGGSGGGGSGGGGSDIQMTQSPSSVSASVGDRVTITCRASQGITRWLAWYQQKPGKAPKLLIYAASVLQSGVPSRFSGSGSGTDFTLTISSLQPEDFATYYCQQSNSFPRTFGCGTKVEIK

SEQ ID NO: 113 - protein, 494 aa, Artificial Sequence
  Synthetic peptide
QVQLVESGGGLVKPGGSLRLSCAASGFTFSDYYMTWIRQAPGKCLEWISYISSSGSTIYYADSVKGRFTISRDNAKNSLYLQMNSLRAEDTAVYYCARDRNSHFDYWGQGTLVTVSSGGGGSGGGGSGGGGSDIQMTQSPSSVSASVGDRVTITCRASQGITRWLAWYQQKPGKAPKLLIYAASVLQSGVPSRFSGSGSGTDFTLTISSLQPEDFATYYCQQSNSFPRTFGCGTKVEIKSGGGGSEVQLVESGGGLVQPGGSLKLSCAASGFTFNKYAMNWVRQAPGKGLEWVARIRSKYNNYATYYADSVKDRFTISRDDSKNTAYLQMNNLKTEDTAVYYCVRHGNFGNSYISYWAYWGQGTLVTVSSGGGGSGGGGSGGGGSQTVVTQEPSLTVSPGGTVTLTCGSSTGAVTSGNYPNWVQQKPGQAPRGLIGGTKFLAPGTPARFSGSLLGGKAALTLSGVQPEDEAEYYCVLWYSNRWVFGGGTKLTVL

SEQ ID NO: 114 - protein, 982 aa, Artificial Sequence
  Synthetic peptide
QVQLVESGGGLVKPGGSLRLSCAASGFTFSDYYMTWIRQAPGKCLEWISYISSSGSTIYYADSVKGRFTISRDNAKNSLYLQMNSLRAEDTAVYYCARDRNSHFDYWGQGTLVTVSSGGGGSGGGGSGGGGSDIQMTQSPSSVSASVGDRVTITCRASQGITRWLAWYQQKPGKAPKLLIYAASVLQSGVPSRFSGSGSGTDFTLTISSLQPEDFATYYCQQSNSFPRTFGCGTKVEIKSGGGGSEVQLVESGGGLVQPGGSLKLSCAASGFTFNKYAMNWVRQAPGKGLEWVARIRSKYNNYATYYADSVKDRFTISRDDSKNTAYLQMNNLKTEDTAVYYCVRHGNFGNSYISYWAYWGQGTLVTVSSGGGGSGGGGSGGGGSQTVVTQEPSLTVSPGGTVTLTCGSSTGAVTSGNYPNWVQQKPGQAPRGLIGGTKFLAPGTPARFSGSLLGGKAALTLSGVQPEDEAEYYCVLWYSNRWVFGGGTKLTVLGGGGDKTHTCPPCPAPELLGGPSVFLFPPKPKDTLMISRTPEVTCVVVDVSHEDPEVKFNWYVDGVEVHNAKTKPCEEQYGSTYRCVSVLTVLHQDWLNGKEYKCKVSNKALPAPIEKTISKAKGQPREPQVYTLPPSREEMTKNQVSLTCLVKGFYPSDIAVEWESNGQPENNYKTTPPVLDSDGSFFLYSKLTVDKSRWQQGNVFSCSVMHEALHNHYTQKSLSLSPGKGGGGSGGGGSGGGGSGGGGSGGGGSGGGGSDKTHTCPPCPAPELLGGPSVFLFPPKPKDTLMISRTPEVTCVVVDVSHEDPEVKFNWYVDGVEVHNAKTKPCEEQYGSTYRCVSVLTVLHQDWLNGKEYKCKVSNKALPAPIEKTISKAKGQPREPQVYTLPPSREEMTKNQVSLTCLVKGFYPSDIAVEWESNGQPENNYKTTPPVLDSDGSFFLYSKLTVDKSRWQQGNVFSCSVMHEALHNHYTQKSLSLSPGK

SEQ ID NO: 115 - protein, 980 aa, Artificial Sequence
  Synthetic peptide
QVQLVESGGGLVKPGGSLRLSCAASGFTFSDYYMTWIRQAPGKCLEWISYISSSGSTIYYADSVKGRFTISRDNAKNSLYLQMNSLRAEDTAVYYCARDRNSHFDYWGQGTLVTVSSGGGGSGGGGSGGGGSDIQMTQSPSSVSASVGDRVTITCRASQGITRWLAWYQQKPGKAPKLLIYAASVLQSGVPSRFSGSGSGTDFTLTISSLQPEDFATYYCQQSNSFPRTFGCGTKVEIKSGGGGSEVQLVESGGGLVQPGGSLKLSCAASGFTFNKYAMNWVRQAPGKGLEWVARIRSKYNNYATYYADSVKDRFTISRDDSKNTAYLQMNNLKTEDTAVYYCVRHGNFGNSYISYWAYWGQGTLVTVSSGGGGSGGGGSGGGGSQTVVTQEPSLTVSPGGTVTLTCGSSTGAVTSGNYPNWVQQKPGQAPRGLIGGTKFLAPGTPARFSGSLLGGKAALTLSGVQPEDEAEYYCVLWYSNRWVFGGGTKLTVLGGGGDKTHTCPPCPAPELLGGPSVFLFPPKPKDTLMISRTPEVTCVVVDVSHEDPEVKFNWYVDGVEVHNAKTKPCEEQYGSTYRCVSVLTVLHQDWLNGKEYKCKVSNKALPAPIEKTISKAKGQPREPQVYTLPPSREEMTKNQVSLTCLVKGFYPSDIAVEWESNGQPENNYKTTPPVLDSDGSFFLYSKLTVDKSRWQQGNVFSCSVMHEALHNHYTQKSLSLSPGGGGSGGGGSGGGGSGGGGSGGGGSGGGGSDKTHTCPPCPAPELLGGPSVFLFPPKPKDTLMISRTPEVTCVVVDVSHEDPEVKFNWYVDGVEVHNAKTKPCEEQYGSTYRCVSVLTVLHQDWLNGKEYKCKVSNKALPAPIEKTISKAKGQPREPQVYTLPPSREEMTKNQVSLTCLVKGFYPSDIAVEWESNGQPENNYKTTPPVLDSDGSFFLYSKLTVDKSRWQQGNVFSCSVMHEALHNHYTQKSLSLSPGK

SEQ ID NO: 116 - protein, 5 aa, Artificial Sequence
  Synthetic peptide
DHYMS

SEQ ID NO: 117 - protein, 17 aa, Artificial Sequence
  Synthetic peptide
YISSSGGIIYYADSVKG

SEQ ID NO: 118 - protein, 8 aa, Artificial Sequence
  Synthetic peptide
DVGSHFDY

SEQ ID NO: 119 - protein, 11 aa, Artificial Sequence
  Synthetic peptide
RASQDISRWLA

SEQ ID NO: 120 - protein, 7 aa, Artificial Sequence
  Synthetic peptide
AASRLQS

SEQ ID NO: 121 - protein, 9 aa, Artificial Sequence
  Synthetic peptide
QQAKSFPRT

SEQ ID NO: 122 - protein, 117 aa, Artificial Sequence
  Synthetic peptide
QVQLVESGGGLVKPGGSLRLSCAASGFTFSDHYMSWIRQAPGKGLEWFSYISSSGGIIYYADSVKGRFTISRDNAKNSLYLQMNSLRAEDTAVYYCARDVGSHFDYWGQGTLVTVSS

SEQ ID NO: 123 - protein, 107 aa, Artificial Sequence
  Synthetic peptide
DIQMTQSPSSVSASVGDRVTITCRASQDISRWLAWYQQKPGKAPKLLISAASRLQSGVPSRFSGSGSGTDFTLTISSLQPEDFAIYYCQQAKSFPRTFGQGTKVEIK

SEQ ID NO: 124 - protein, 239 aa, Artificial Sequence
  Synthetic peptide
QVQLVESGGGLVKPGGSLRLSCAASGFTFSDHYMSWIRQAPGKGLEWFSYISSSGGIIYYADSVKGRFTISRDNAKNSLYLQMNSLRAEDTAVYYCARDVGSHFDYWGQGTLVTVSSGGGGSGGGGSGGGGSDIQMTQSPSSVSASVGDRVTITCRASQDISRWLAWYQQKPGKAPKLLISAASRLQSGVPSRFSGSGSGTDFTLTISSLQPEDFAIYYCQQAKSFPRTFGQGTKVEIK

SEQ ID NO: 125 - protein, 494 aa, Artificial Sequence
  Synthetic peptide
QVQLVESGGGLVKPGGSLRLSCAASGFTFSDHYMSWIRQAPGKGLEWFSYISSSGGIIYYADSVKGRFTISRDNAKNSLYLQMNSLRAEDTAVYYCARDVGSHFDYWGQGTLVTVSSGGGGSGGGGSGGGGSDIQMTQSPSSVSASVGDRVTITCRASQDISRWLAWYQQKPGKAPKLLISAASRLQSGVPSRFSGSGSGTDFTLTISSLQPEDFAIYYCQQAKSFPRTFGQGTKVEIKSGGGGSEVQLVESGGGLVQPGGSLKLSCAASGFTFNKYAMNWVRQAPGKGLEWVARIRSKYNNYATYYADSVKDRFTISRDDSKNTAYLQMNNLKTEDTAVYYCVRHGNFGNSYISYWAYWGQGTLVTVSSGGGGSGGGGSGGGGSQTVVTQEPSLTVSPGGTVTLTCGSSTGAVTSGNYPNWVQQKPGQAPRGLIGGTKFLAPGTPARFSGSLLGGKAALTLSGVQPEDEAEYYCVLWYSNRWVFGGGTKLTVL

SEQ ID NO: 126 - protein, 982 aa, Artificial Sequence
  Synthetic peptide
QVQLVESGGGLVKPGGSLRLSCAASGFTFSDHYMSWIRQAPGKGLEWFSYISSSGGIIYYADSVKGRFTISRDNAKNSLYLQMNSLRAEDTAVYYCARDVGSHFDYWGQGTLVTVSSGGGGSGGGGSGGGGSDIQMTQSPSSVSASVGDRVTITCRASQDISRWLAWYQQKPGKAPKLLISAASRLQSGVPSRFSGSGSGTDFTLTISSLQPEDFAIYYCQQAKSFPRTFGQGTKVEIKSGGGGSEVQLVESGGGLVQPGGSLKLSCAASGFTFNKYAMNWVRQAPGKGLEWVARIRSKYNNYATYYADSVKDRFTISRDDSKNTAYLQMNNLKTEDTAVYYCVRHGNFGNSYISYWAYWGQGTLVTVSSGGGGSGGGGSGGGGSQTVVTQEPSLTVSPGGTVTLTCGSSTGAVTSGNYPNWVQQKPGQAPRGLIGGTKFLAPGTPARFSGSLLGGKAALTLSGVQPEDEAEYYCVLWYSNRWVFGGGTKLTVLGGGGDKTHTCPPCPAPELLGGPSVFLFPPKPKDTLMISRTPEVTCVVVDVSHEDPEVKFNWYVDGVEVHNAKTKPCEEQYGSTYRCVSVLTVLHQDWLNGKEYKCKVSNKALPAPIEKTISKAKGQPREPQVYTLPPSREEMTKNQVSLTCLVKGFYPSDIAVEWESNGQPENNYKTTPPVLDSDGSFFLYSKLTVDKSRWQQGNVFSCSVMHEALHNHYTQKSLSLSPGKGGGGSGGGGSGGGGSGGGGSGGGGSGGGGSDKTHTCPPCPAPELLGGPSVFLFPPKPKDTLMISRTPEVTCVVVDVSHEDPEVKFNWYVDGVEVHNAKTKPCEEQYGSTYRCVSVLTVLHQDWLNGKEYKCKVSNKALPAPIEKTISKAKGQPREPQVYTLPPSREEMTKNQVSLTCLVKGFYPSDIAVEWESNGQPENNYKTTPPVLDSDGSFFLYSKLTVDKSRWQQGNVFSCSVMHEALHNHYTQKSLSLSPGK

SEQ ID NO: 127 - protein, 980 aa, Artificial Sequence
  Synthetic peptide
QVQLVESGGGLVKPGGSLRLSCAASGFTFSDHYMSWIRQAPGKGLEWFSYISSSGGIIYYADSVKGRFTISRDNAKNSLYLQMNSLRAEDTAVYYCARDVGSHFDYWGQGTLVTVSSGGGGSGGGGSGGGGSDIQMTQSPSSVSASVGDRVTITCRASQDISRWLAWYQQKPGKAPKLLISAASRLQSGVPSRFSGSGSGTDFTLTISSLQPEDFAIYYCQQAKSFPRTFGQGTKVEIKSGGGGSEVQLVESGGGLVQPGGSLKLSCAASGFTFNKYAMNWVRQAPGKGLEWVARIRSKYNNYATYYADSVKDRFTISRDDSKNTAYLQMNNLKTEDTAVYYCVRHGNFGNSYISYWAYWGQGTLVTVSSGGGGSGGGGSGGGGSQTVVTQEPSLTVSPGGTVTLTCGSSTGAVTSGNYPNWVQQKPGQAPRGLIGGTKFLAPGTPARFSGSLLGGKAALTLSGVQPEDEAEYYCVLWYSNRWVFGGGTKLTVLGGGGDKTHTCPPCPAPELLGGPSVFLFPPKPKDTLMISRTPEVTCVVVDVSHEDPEVKFNWYVDGVEVHNAKTKPCEEQYGSTYRCVSVLTVLHQDWLNGKEYKCKVSNKALPAPIEKTISKAKGQPREPQVYTLPPSREEMTKNQVSLTCLVKGFYPSDIAVEWESNGQPENNYKTTPPVLDSDGSFFLYSKLTVDKSRWQQGNVFSCSVMHEALHNHYTQKSLSLSPGGGGSGGGGSGGGGSGGGGSGGGGSGGGGSDKTHTCPPCPAPELLGGPSVFLFPPKPKDTLMISRTPEVTCVVVDVSHEDPEVKFNWYVDGVEVHNAKTKPCEEQYGSTYRCVSVLTVLHQDWLNGKEYKCKVSNKALPAPIEKTISKAKGQPREPQVYTLPPSREEMTKNQVSLTCLVKGFYPSDIAVEWESNGQPENNYKTTPPVLDSDGSFFLYSKLTVDKSRWQQGNVFSCSVMHEALHNHYTQKSLSLSPGK

SEQ ID NO: 128 - protein, 117 aa, Artificial Sequence
  Synthetic peptide
QVQLVESGGGLVKPGGSLRLSCAASGFTFSDHYMSWIRQAPGKCLEWFSYISSSGGIIYYADSVKGRFTISRDNAKNSLYLQMNSLRAEDTAVYYCARDVGSHFDYWGQGTLVTVSS

SEQ ID NO: 129 - protein, 107 aa, Artificial Sequence
  Synthetic peptide
DIQMTQSPSSVSASVGDRVTITCRASQDISRWLAWYQQKPGKAPKLLISAASRLQSGVPSRFSGSGSGTDFTLTISSLQPEDFAIYYCQQAKSFPRTFGCGTKVEIK

SEQ ID NO: 130 - protein, 239 aa, Artificial Sequence
  Synthetic peptide
QVQLVESGGGLVKPGGSLRLSCAASGFTFSDHYMSWIRQAPGKCLEWFSYISSSGGIIYYADSVKGRFTISRDNAKNSLYLQMNSLRAEDTAVYYCARDVGSHFDYWGQGTLVTVSSGGGGSGGGGSGGGGSDIQMTQSPSSVSASVGDRVTITCRASQDISRWLAWYQQKPGKAPKLLISAASRLQSGVPSRFSGSGSGTDFTLTISSLQPEDFAIYYCQQAKSFPRTFGCGTKVEIK

SEQ ID NO: 131 - protein, 494 aa, Artificial Sequence
  Synthetic peptide
QVQLVESGGGLVKPGGSLRLSCAASGFTFSDHYMSWIRQAPGKCLEWFSYISSSGGIIYYADSVKGRFTISRDNAKNSLYLQMNSLRAEDTAVYYCARDVGSHFDYWGQGTLVTVSSGGGGSGGGGSGGGGSDIQMTQSPSSVSASVGDRVTITCRASQDISRWLAWYQQKPGKAPKLLISAASRLQSGVPSRFSGSGSGTDFTLTISSLQPEDFAIYYCQQAKSFPRTFGCGTKVEIKSGGGGSEVQLVESGGGLVQPGGSLKLSCAASGFTFNKYAMNWVRQAPGKGLEWVARIRSKYNNYATYYADSVKDRFTISRDDSKNTAYLQMNNLKTEDTAVYYCVRHGNFGNSYISYWAYWGQGTLVTVSSGGGGSGGGGSGGGGSQTVVTQEPSLTVSPGGTVTLTCGSSTGAVTSGNYPNWVQQKPGQAPRGLIGGTKFLAPGTPARFSGSLLGGKAALTLSGVQPEDEAEYYCVLWYSNRWVFGGGTKLTVL

SEQ ID NO: 132 - protein, 982 aa, Artificial Sequence
  Synthetic peptide
QVQLVESGGGLVKPGGSLRLSCAASGFTFSDHYMSWIRQAPGKCLEWFSYISSSGGIIYYADSVKGRFTISRDNAKNSLYLQMNSLRAEDTAVYYCARDVGSHFDYWGQGTLVTVSSGGGGSGGGGSGGGGSDIQMTQSPSSVSASVGDRVTITCRASQDISRWLAWYQQKPGKAPKLLISAASRLQSGVPSRFSGSGSGTDFTLTISSLQPEDFAIYYCQQAKSFPRTFGCGTKVEIKSGGGGSEVQLVESGGGLVQPGGSLKLSCAASGFTFNKYAMNWVRQAPGKGLEWVARIRSKYNNYATYYADSVKDRFTISRDDSKNTAYLQMNNLKTEDTAVYYCVRHGNFGNSYISYWAYWGQGTLVTVSSGGGGSGGGGSGGGGSQTVVTQEPSLTVSPGGTVTLTCGSSTGAVTSGNYPNWVQQKPGQAPRGLIGGTKFLAPGTPARFSGSLLGGKAALTLSGVQPEDEAEYYCVLWYSNRWVFGGGTKLTVLGGGGDKTHTCPPCPAPELLGGPSVFLFPPKPKDTLMISRTPEVTCVVVDVSHEDPEVKFNWYVDGVEVHNAKTKPCEEQYGSTYRCVSVLTVLHQDWLNGKEYKCKVSNKALPAPIEKTISKAKGQPREPQVYTLPPSREEMTKNQVSLTCLVKGFYPSDIAVEWESNGQPENNYKTTPPVLDSDGSFFLYSKLTVDKSRWQQGNVFSCSVMHEALHNHYTQKSLSLSPGKGGGGSGGGGSGGGGSGGGGSGGGGSGGGGSDKTHTCPPCPAPELLGGPSVFLFPPKPKDTLMISRTPEVTCVVVDVSHEDPEVKFNWYVDGVEVHNAKTKPCEEQYGSTYRCVSVLTVLHQDWLNGKEYKCKVSNKALPAPIEKTISKAKGQPREPQVYTLPPSREEMTKNQVSLTCLVKGFYPSDIAVEWESNGQPENNYKTTPPVLDSDGSFFLYSKLTVDKSRWQQGNVFSCSVMHEALHNHYTQKSLSLSPGK

SEQ ID NO: 133 - protein, 980 aa, Artificial Sequence
  Synthetic peptide
QVQLVESGGGLVKPGGSLRLSCAASGFTFSDHYMSWIRQAPGKCLEWFSYISSSGGIIYYADSVKGRFTISRDNAKNSLYLQMNSLRAEDTAVYYCARDVGSHFDYWGQGTLVTVSSGGGGSGGGGSGGGGSDIQMTQSPSSVSASVGDRVTITCRASQDISRWLAWYQQKPGKAPKLLISAASRLQSGVPSRFSGSGSGTDFTLTISSLQPEDFAIYYCQQAKSFPRTFGCGTKVEIKSGGGGSEVQLVESGGGLVQPGGSLKLSCAASGFTFNKYAMNWVRQAPGKGLEWVARIRSKYNNYATYYADSVKDRFTISRDDSKNTAYLQMNNLKTEDTAVYYCVRHGNFGNSYISYWAYWGQGTLVTVSSGGGGSGGGGSGGGGSQTVVTQEPSLTVSPGGTVTLTCGSSTGAVTSGNYPNWVQQKPGQAPRGLIGGTKFLAPGTPARFSGSLLGGKAALTLSGVQPEDEAEYYCVLWYSNRWVFGGGTKLTVLGGGGDKTHTCPPCPAPELLGGPSVFLFPPKPKDTLMISRTPEVTCVVVDVSHEDPEVKFNWYVDGVEVHNAKTKPCEEQYGSTYRCVSVLTVLHQDWLNGKEYKCKVSNKALPAPIEKTISKAKGQPREPQVYTLPPSREEMTKNQVSLTCLVKGFYPSDIAVEWESNGQPENNYKTTPPVLDSDGSFFLYSKLTVDKSRWQQGNVFSCSVMHEALHNHYTQKSLSLSPGGGGSGGGGSGGGGSGGGGSGGGGSGGGGSDKTHTCPPCPAPELLGGPSVFLFPPKPKDTLMISRTPEVTCVVVDVSHEDPEVKFNWYVDGVEVHNAKTKPCEEQYGSTYRCVSVLTVLHQDWLNGKEYKCKVSNKALPAPIEKTISKAKGQPREPQVYTLPPSREEMTKNQVSLTCLVKGFYPSDIAVEWESNGQPENNYKTTPPVLDSDGSFFLYSKLTVDKSRWQQGNVFSCSVMHEALHNHYTQKSLSLSPGK

SEQ ID NO: 134 - protein, 5 aa, Artificial Sequence
  Synthetic peptide
SYGMH

SEQ ID NO: 135 - protein, 17 aa, Artificial Sequence
  Synthetic peptide
FIWYDGSNKYYADSVKD

SEQ ID NO: 136 - protein, 16 aa, Artificial Sequence
  Synthetic peptide
RAGIIGTIGYYYGMDV

SEQ ID NO: 137 - protein, 11 aa, Artificial Sequence
  Synthetic peptide
SGDRLGEKYTS

SEQ ID NO: 138 - protein, 7 aa, Artificial Sequence
  Synthetic peptide
QDTKRPS

SEQ ID NO: 139 - protein, 9 aa, Artificial Sequence
  Synthetic peptide
QAWESSTVV

SEQ ID NO: 140 - protein, 125 aa, Artificial Sequence
  Synthetic peptide
QVQLVESGGGVVQPGGSLRLSCAASGFTFSSYGMHWVRQAPGKGLEWVAFIWYDGSNKYYADSVKDRFTISRDNSKNTLYLQMNSLRAEDTAVYYCARRAGIIGTIGYYYGMDVWGQGTTVTVSS

SEQ ID NO: 141 - protein, 106 aa, Artificial Sequence
  Synthetic peptide
SYELTQPPSVSVSPGQTASITCSGDRLGEKYTSWYQQRPGQSPLLVIYQDTKRPSGIPERFSGSNSGNTATLTISGTQAMDEADYYCQAWESSTVVFGGGTKLTVL

SEQ ID NO: 142 - protein, 246 aa, Artificial Sequence
  Synthetic peptide
QVQLVESGGGVVQPGGSLRLSCAASGFTFSSYGMHWVRQAPGKGLEWVAFIWYDGSNKYYADSVKDRFTISRDNSKNTLYLQMNSLRAEDTAVYYCARRAGIIGTIGYYYGMDVWGQGTTVTVSSGGGGSGGGGSGGGGSSYELTQPPSVSVSPGQTASITCSGDRLGEKYTSWYQQRPGQSPLLVIYQDTKRPSGIPERFSGSNSGNTATLTISGTQAMDEADYYCQAWESSTVVFGGGTKLTVL

SEQ ID NO: 143 - protein, 501 aa, Artificial Sequence
  Synthetic peptide
QVQLVESGGGVVQPGGSLRLSCAASGFTFSSYGMHWVRQAPGKGLEWVAFIWYDGSNKYYADSVKDRFTISRDNSKNTLYLQMNSLRAEDTAVYYCARRAGIIGTIGYYYGMDVWGQGTTVTVSSGGGGSGGGGSGGGGSSYELTQPPSVSVSPGQTASITCSGDRLGEKYTSWYQQRPGQSPLLVIYQDTKRPSGIPERFSGSNSGNTATLTISGTQAMDEADYYCQAWESSTVVFGGGTKLTVLSGGGGSEVQLVESGGGLVQPGGSLKLSCAASGFTFNKYAMNWVRQAPGKGLEWVARIRSKYNNYATYYADSVKDRFTISRDDSKNTAYLQMNNLKTEDTAVYYCVRHGNFGNSYISYWAYWGQGTLVTVSSGGGGSGGGGSGGGGSQTVVTQEPSLTVSPGGTVTLTCGSSTGAVTSGNYPNWVQQKPGQAPRGLIGGTKFLAPGTPARFSGSLLGGKAALTLSGVQPEDEAEYYCVLWYSNRWVFGGGTKLTVL

SEQ ID NO: 144 - protein, 989 aa, Artificial Sequence
  Synthetic peptide
QVQLVESGGGVVQPGGSLRLSCAASGFTFSSYGMHWVRQAPGKGLEWVAFIWYDGSNKYYADSVKDRFTISRDNSKNTLYLQMNSLRAEDTAVYYCARRAGIIGTIGYYYGMDVWGQGTTVTVSSGGGGSGGGGSGGGGSSYELTQPPSVSVSPGQTASITCSGDRLGEKYTSWYQQRPGQSPLLVIYQDTKRPSGIPERFSGSNSGNTATLTISGTQAMDEADYYCQAWESSTVVFGGGTKLTVLSGGGGSEVQLVESGGGLVQPGGSLKLSCAASGFTFNKYAMNWVRQAPGKGLEWVARIRSKYNNYATYYADSVKDRFTISRDDSKNTAYLQMNNLKTEDTAVYYCVRHGNFGNSYISYWAYWGQGTLVTVSSGGGGSGGGGSGGGGSQTVVTQEPSLTVSPGGTVTLTCGSSTGAVTSGNYPNWVQQKPGQAPRGLIGGTKFLAPGTPARFSGSLLGGKAALTLSGVQPEDEAEYYCVLWYSNRWVFGGGTKLTVLGGGGDKTHTCPPCPAPELLGGPSVFLFPPKPKDTLMISRTPEVTCVVVDVSHEDPEVKFNWYVDGVEVHNAKTKPCEEQYGSTYRCVSVLTVLHQDWLNGKEYKCKVSNKALPAPIEKTISKAKGQPREPQVYTLPPSREEMTKNQVSLTCLVKGFYPSDIAVEWESNGQPENNYKTTPPVLDSDGSFFLYSKLTVDKSRWQQGNVFSCSVMHEALHNHYTQKSLSLSPGKGGGGSGGGGSGGGGSGGGGSGGGGSGGGGSDKTHTCPPCPAPELLGGPSVFLFPPKPKDTLMISRTPEVTCVVVDVSHEDPEVKFNWYVDGVEVHNAKTKPCEEQYGSTYRCVSVLTVLHQDWLNGKEYKCKVSNKALPAPIEKTISKAKGQPREPQVYTLPPSREEMTKNQVSLTCLVKGFYPSDIAVEWESNGQPENNYKTTPPVLDSDGSFFLYSKLTVDKSRWQQGNVFSCSVMHEALHNHYTQKSLSLSPGK

SEQ ID NO: 145 - protein, 987 aa, Artificial Sequence
  Synthetic peptide
QVQLVESGGGVVQPGGSLRLSCAASGFTFSSYGMHWVRQAPGKGLEWVAFIWYDGSNKYYADSVKDRFTISRDNSKNTLYLQMNSLRAEDTAVYYCARRAGIIGTIGYYYGMDVWGQGTTVTVSSGGGGSGGGGSGGGGSSYELTQPPSVSVSPGQTASITCSGDRLGEKYTSWYQQRPGQSPLLVIYQDTKRPSGIPERFSGSNSGNTATLTISGTQAMDEADYYCQAWESSTVVFGGGTKLTVLSGGGGSEVQLVESGGGLVQPGGSLKLSCAASGFTFNKYAMNWVRQAPGKGLEWVARIRSKYNNYATYYADSVKDRFTISRDDSKNTAYLQMNNLKTEDTAVYYCVRHGNFGNSYISYWAYWGQGTLVTVSSGGGGSGGGGSGGGGSQTVVTQEPSLTVSPGGTVTLTCGSSTGAVTSGNYPNWVQQKPGQAPRGLIGGTKFLAPGTPARFSGSLLGGKAALTLSGVQPEDEAEYYCVLWYSNRWVFGGGTKLTVLGGGGDKTHTCPPCPAPELLGGPSVFLFPPKPKDTLMISRTPEVTCVVVDVSHEDPEVKFNWYVDGVEVHNAKTKPCEEQYGSTYRCVSVLTVLHQDWLNGKEYKCKVSNKALPAPIEKTISKAKGQPREPQVYTLPPSREEMTKNQVSLTCLVKGFYPSDIAVEWESNGQPENNYKTTPPVLDSDGSFFLYSKLTVDKSRWQQGNVFSCSVMHEALHNHYTQKSLSLSPGGGGSGGGGSGGGGSGGGGSGGGGSGGGGSDKTHTCPPCPAPELLGGPSVFLFPPKPKDTLMISRTPEVTCVVVDVSHEDPEVKFNWYVDGVEVHNAKTKPCEEQYGSTYRCVSVLTVLHQDWLNGKEYKCKVSNKALPAPIEKTISKAKGQPREPQVYTLPPSREEMTKNQVSLTCLVKGFYPSDIAVEWESNGQPENNYKTTPPVLDSDGSFFLYSKLTVDKSRWQQGNVFSCSVMHEALHNHYTQKSLSLSPGK

SEQ ID NO: 146 - protein, 125 aa, Artificial Sequence
  Synthetic peptide
QVQLVESGGGVVQPGGSLRLSCAASGFTFSSYGMHWVRQAPGKCLEWVAFIWYDGSNKYYADSVKDRFTISRDNSKNTLYLQMNSLRAEDTAVYYCARRAGIIGTIGYYYGMDVWGQGTTVTVSS

SEQ ID NO: 147 - protein, 106 aa, Artificial Sequence
  Synthetic peptide
SYELTQPPSVSVSPGQTASITCSGDRLGEKYTSWYQQRPGQSPLLVIYQDTKRPSGIPERFSGSNSGNTATLTISGTQAMDEADYYCQAWESSTVVFGCGTKLTVL

SEQ ID NO: 148 - protein, 246 aa, Artificial Sequence
  Synthetic peptide
QVQLVESGGGVVQPGGSLRLSCAASGFTFSSYGMHWVRQAPGKCLEWVAFIWYDGSNKYYADSVKDRFTISRDNSKNTLYLQMNSLRAEDTAVYYCARRAGIIGTIGYYYGMDVWGQGTTVTVSSGGGGSGGGGSGGGGSSYELTQPPSVSVSPGQTASITCSGDRLGEKYTSWYQQRPGQSPLLVIYQDTKRPSGIPERFSGSNSGNTATLTISGTQAMDEADYYCQAWESSTVVFGCGTKLTVL

SEQ ID NO: 149 - protein, 501 aa, Artificial Sequence
  Synthetic peptide
QVQLVESGGGVVQPGGSLRLSCAASGFTFSSYGMHWVRQAPGKCLEWVAFIWYDGSNKYYADSVKDRFTISRDNSKNTLYLQMNSLRAEDTAVYYCARRAGIIGTIGYYYGMDVWGQGTTVTVSSGGGGSGGGGSGGGGSSYELTQPPSVSVSPGQTASITCSGDRLGEKYTSWYQQRPGQSPLLVIYQDTKRPSGIPERFSGSNSGNTATLTISGTQAMDEADYYCQAWESSTVVFGCGTKLTVLSGGGGSEVQLVESGGGLVQPGGSLKLSCAASGFTFNKYAMNWVRQAPGKGLEWVARIRSKYNNYATYYADSVKDRFTISRDDSKNTAYLQMNNLKTEDTAVYYCVRHGNFGNSYISYWAYWGQGTLVTVSSGGGGSGGGGSGGGGSQTVVTQEPSLTVSPGGTVTLTCGSSTGAVTSGNYPNWVQQKPGQAPRGLIGGTKFLAPGTPARFSGSLLGGKAALTLSGVQPEDEAEYYCVLWYSNRWVFGGGTKLTVL

SEQ ID NO: 150 - protein, 989 aa, Artificial Sequence
  Synthetic peptide
QVQLVESGGGVVQPGGSLRLSCAASGFTFSSYGMHWVRQAPGKCLEWVAFIWYDGSNKYYADSVKDRFTISRDNSKNTLYLQMNSLRAEDTAVYYCARRAGIIGTIGYYYGMDVWGQGTTVTVSSGGGGSGGGGSGGGGSSYELTQPPSVSVSPGQTASITCSGDRLGEKYTSWYQQRPGQSPLLVIYQDTKRPSGIPERFSGSNSGNTATLTISGTQAMDEADYYCQAWESSTVVFGCGTKLTVLSGGGGSEVQLVESGGGLVQPGGSLKLSCAASGFTFNKYAMNWVRQAPGKGLEWVARIRSKYNNYATYYADSVKDRFTISRDDSKNTAYLQMNNLKTEDTAVYYCVRHGNFGNSYISYWAYWGQGTLVTVSSGGGGSGGGGSGGGGSQTVVTQEPSLTVSPGGTVTLTCGSSTGAVTSGNYPNWVQQKPGQAPRGLIGGTKFLAPGTPARFSGSLLGGKAALTLSGVQPEDEAEYYCVLWYSNRWVFGGGTKLTVLGGGGDKTHTCPPCPAPELLGGPSVFLFPPKPKDTLMISRTPEVTCVVVDVSHEDPEVKFNWYVDGVEVHNAKTKPCEEQYGSTYRCVSVLTVLHQDWLNGKEYKCKVSNKALPAPIEKTISKAKGQPREPQVYTLPPSREEMTKNQVSLTCLVKGFYPSDIAVEWESNGQPENNYKTTPPVLDSDGSFFLYSKLTVDKSRWQQGNVFSCSVMHEALHNHYTQKSLSLSPGKGGGGSGGGGSGGGGSGGGGSGGGGSGGGGSDKTHTCPPCPAPELLGGPSVFLFPPKPKDTLMISRTPEVTCVVVDVSHEDPEVKFNWYVDGVEVHNAKTKPCEEQYGSTYRCVSVLTVLHQDWLNGKEYKCKVSNKALPAPIEKTISKAKGQPREPQVYTLPPSREEMTKNQVSLTCLVKGFYPSDIAVEWESNGQPENNYKTTPPVLDSDGSFFLYSKLTVDKSRWQQGNVFSCSVMHEALHNHYTQKSLSLSPGK

SEQ ID NO: 151 - protein, 987 aa, Artificial Sequence
  Synthetic peptide
QVQLVESGGGVVQPGGSLRLSCAASGFTFSSYGMHWVRQAPGKCLEWVAFIWYDGSNKYYADSVKDRFTISRDNSKNTLYLQMNSLRAEDTAVYYCARRAGIIGTIGYYYGMDVWGQGTTVTVSSGGGGSGGGGSGGGGSSYELTQPPSVSVSPGQTASITCSGDRLGEKYTSWYQQRPGQSPLLVIYQDTKRPSGIPERFSGSNSGNTATLTISGTQAMDEADYYCQAWESSTVVFGCGTKLTVLSGGGGSEVQLVESGGGLVQPGGSLKLSCAASGFTFNKYAMNWVRQAPGKGLEWVARIRSKYNNYATYYADSVKDRFTISRDDSKNTAYLQMNNLKTEDTAVYYCVRHGNFGNSYISYWAYWGQGTLVTVSSGGGGSGGGGSGGGGSQTVVTQEPSLTVSPGGTVTLTCGSSTGAVTSGNYPNWVQQKPGQAPRGLIGGTKFLAPGTPARFSGSLLGGKAALTLSGVQPEDEAEYYCVLWYSNRWVFGGGTKLTVLGGGGDKTHTCPPCPAPELLGGPSVFLFPPKPKDTLMISRTPEVTCVVVDVSHEDPEVKFNWYVDGVEVHNAKTKPCEEQYGSTYRCVSVLTVLHQDWLNGKEYKCKVSNKALPAPIEKTISKAKGQPREPQVYTLPPSREEMTKNQVSLTCLVKGFYPSDIAVEWESNGQPENNYKTTPPVLDSDGSFFLYSKLTVDKSRWQQGNVFSCSVMHEALHNHYTQKSLSLSPGGGGSGGGGSGGGGSGGGGSGGGGSGGGGSDKTHTCPPCPAPELLGGPSVFLFPPKPKDTLMISRTPEVTCVVVDVSHEDPEVKFNWYVDGVEVHNAKTKPCEEQYGSTYRCVSVLTVLHQDWLNGKEYKCKVSNKALPAPIEKTISKAKGQPREPQVYTLPPSREEMTKNQVSLTCLVKGFYPSDIAVEWESNGQPENNYKTTPPVLDSDGSFFLYSKLTVDKSRWQQGNVFSCSVMHEALHNHYTQKSLSLSPGK

SEQ ID NO: 152 - protein, 5 aa, Artificial Sequence
  Synthetic peptide
SYGMH

SEQ ID NO: 153 - protein, 17 aa, Artificial Sequence
  Synthetic peptide
FIWYDGSNKYYADSVKG

SEQ ID NO: 154 - protein, 16 aa, Artificial Sequence
  Synthetic peptide
RAGIIGTIGYYYGMDV

SEQ ID NO: 155 - protein, 11 aa, Artificial Sequence
  Synthetic peptide
SGDRLGEKYTS

SEQ ID NO: 156 - protein, 7 aa, Artificial Sequence
  Synthetic peptide
QDTKRPS

SEQ ID NO: 157 - protein, 9 aa, Artificial Sequence
  Synthetic peptide
QAWESSTVV

SEQ ID NO: 158 - protein, 125 aa, Artificial Sequence
  Synthetic peptide
QVQLVESGGGVVQPGGSLRLSCAASGFTFSSYGMHWVRQAPGKGLEWVAFIWYDGSNKYYADSVKGRFTISRDNSKNTLYLQMNSLRAEDTAVYYCARRAGIIGTIGYYYGMDVWGQGTTVTVSS

SEQ ID NO: 159 - protein, 106 aa, Artificial Sequence; identical to SEQ ID NO: 141
  Synthetic peptide

SEQ ID NO: 160 - protein, 246 aa, Artificial Sequence
  Synthetic peptide
QVQLVESGGGVVQPGGSLRLSCAASGFTFSSYGMHWVRQAPGKGLEWVAFIWYDGSNKYYADSVKGRFTISRDNSKNTLYLQMNSLRAEDTAVYYCARRAGIIGTIGYYYGMDVWGQGTTVTVSSGGGGSGGGGSGGGGSSYELTQPPSVSVSPGQTASITCSGDRLGEKYTSWYQQRPGQSPLLVIYQDTKRPSGIPERFSGSNSGNTATLTISGTQAMDEADYYCQAWESSTVVFGGGTKLTVL

SEQ ID NO: 161 - protein, 501 aa, Artificial Sequence
  Synthetic peptide
QVQLVESGGGVVQPGGSLRLSCAASGFTFSSYGMHWVRQAPGKGLEWVAFIWYDGSNKYYADSVKGRFTISRDNSKNTLYLQMNSLRAEDTAVYYCARRAGIIGTIGYYYGMDVWGQGTTVTVSSGGGGSGGGGSGGGGSSYELTQPPSVSVSPGQTASITCSGDRLGEKYTSWYQQRPGQSPLLVIYQDTKRPSGIPERFSGSNSGNTATLTISGTQAMDEADYYCQAWESSTVVFGGGTKLTVLSGGGGSEVQLVESGGGLVQPGGSLKLSCAASGFTFNKYAMNWVRQAPGKGLEWVARIRSKYNNYATYYADSVKDRFTISRDDSKNTAYLQMNNLKTEDTAVYYCVRHGNFGNSYISYWAYWGQGTLVTVSSGGGGSGGGGSGGGGSQTVVTQEPSLTVSPGGTVTLTCGSSTGAVTSGNYPNWVQQKPGQAPRGLIGGTKFLAPGTPARFSGSLLGGKAALTLSGVQPEDEAEYYCVLWYSNRWVFGGGTKLTVL

SEQ ID NO: 162 - protein, 989 aa, Artificial Sequence
  Synthetic peptide
QVQLVESGGGVVQPGGSLRLSCAASGFTFSSYGMHWVRQAPGKGLEWVAFIWYDGSNKYYADSVKGRFTISRDNSKNTLYLQMNSLRAEDTAVYYCARRAGIIGTIGYYYGMDVWGQGTTVTVSSGGGGSGGGGSGGGGSSYELTQPPSVSVSPGQTASITCSGDRLGEKYTSWYQQRPGQSPLLVIYQDTKRPSGIPERFSGSNSGNTATLTISGTQAMDEADYYCQAWESSTVVFGGGTKLTVLSGGGGSEVQLVESGGGLVQPGGSLKLSCAASGFTFNKYAMNWVRQAPGKGLEWVARIRSKYNNYATYYADSVKDRFTISRDDSKNTAYLQMNNLKTEDTAVYYCVRHGNFGNSYISYWAYWGQGTLVTVSSGGGGSGGGGSGGGGSQTVVTQEPSLTVSPGGTVTLTCGSSTGAVTSGNYPNWVQQKPGQAPRGLIGGTKFLAPGTPARFSGSLLGGKAALTLSGVQPEDEAEYYCVLWYSNRWVFGGGTKLTVLGGGGDKTHTCPPCPAPELLGGPSVFLFPPKPKDTLMISRTPEVTCVVVDVSHEDPEVKFNWYVDGVEVHNAKTKPCEEQYGSTYRCVSVLTVLHQDWLNGKEYKCKVSNKALPAPIEKTISKAKGQPREPQVYTLPPSREEMTKNQVSLTCLVKGFYPSDIAVEWESNGQPENNYKTTPPVLDSDGSFFLYSKLTVDKSRWQQGNVFSCSVMHEALHNHYTQKSLSLSPGKGGGGSGGGGSGGGGSGGGGSGGGGSGGGGSDKTHTCPPCPAPELLGGPSVFLFPPKPKDTLMISRTPEVTCVVVDVSHEDPEVKFNWYVDGVEVHNAKTKPCEEQYGSTYRCVSVLTVLHQDWLNGKEYKCKVSNKALPAPIEKTISKAKGQPREPQVYTLPPSREEMTKNQVSLTCLVKGFYPSDIAVEWESNGQPENNYKTTPPVLDSDGSFFLYSKLTVDKSRWQQGNVFSCSVMHEALHNHYTQKSLSLSPGK

SEQ ID NO: 163 - protein, 987 aa, Artificial Sequence
  Synthetic peptide
QVQLVESGGGVVQPGGSLRLSCAASGFTFSSYGMHWVRQAPGKGLEWVAFIWYDGSNKYYADSVKGRFTISRDNSKNTLYLQMNSLRAEDTAVYYCARRAGIIGTIGYYYGMDVWGQGTTVTVSSGGGGSGGGGSGGGGSSYELTQPPSVSVSPGQTASITCSGDRLGEKYTSWYQQRPGQSPLLVIYQDTKRPSGIPERFSGSNSGNTATLTISGTQAMDEADYYCQAWESSTVVFGGGTKLTVLSGGGGSEVQLVESGGGLVQPGGSLKLSCAASGFTFNKYAMNWVRQAPGKGLEWVARIRSKYNNYATYYADSVKDRFTISRDDSKNTAYLQMNNLKTEDTAVYYCVRHGNFGNSYISYWAYWGQGTLVTVSSGGGGSGGGGSGGGGSQTVVTQEPSLTVSPGGTVTLTCGSSTGAVTSGNYPNWVQQKPGQAPRGLIGGTKFLAPGTPARFSGSLLGGKAALTLSGVQPEDEAEYYCVLWYSNRWVFGGGTKLTVLGGGGDKTHTCPPCPAPELLGGPSVFLFPPKPKDTLMISRTPEVTCVVVDVSHEDPEVKFNWYVDGVEVHNAKTKPCEEQYGSTYRCVSVLTVLHQDWLNGKEYKCKVSNKALPAPIEKTISKAKGQPREPQVYTLPPSREEMTKNQVSLTCLVKGFYPSDIAVEWESNGQPENNYKTTPPVLDSDGSFFLYSKLTVDKSRWQQGNVFSCSVMHEALHNHYTQKSLSLSPGGGGSGGGGSGGGGSGGGGSGGGGSGGGGSDKTHTCPPCPAPELLGGPSVFLFPPKPKDTLMISRTPEVTCVVVDVSHEDPEVKFNWYVDGVEVHNAKTKPCEEQYGSTYRCVSVLTVLHQDWLNGKEYKCKVSNKALPAPIEKTISKAKGQPREPQVYTLPPSREEMTKNQVSLTCLVKGFYPSDIAVEWESNGQPENNYKTTPPVLDSDGSFFLYSKLTVDKSRWQQGNVFSCSVMHEALHNHYTQKSLSLSPGK

SEQ ID NO: 164 - protein, 125 aa, Artificial Sequence
  Synthetic peptide
QVQLVESGGGVVQPGGSLRLSCAASGFTFSSYGMHWVRQAPGKCLEWVAFIWYDGSNKYYADSVKGRFTISRDNSKNTLYLQMNSLRAEDTAVYYCARRAGIIGTIGYYYGMDVWGQGTTVTVSS

SEQ ID NO: 165 - protein, 106 aa, Artificial Sequence; identical to SEQ ID NO: 147
  Synthetic peptide

SEQ ID NO: 166 - protein, 246 aa, Artificial Sequence
  Synthetic peptide
QVQLVESGGGVVQPGGSLRLSCAASGFTFSSYGMHWVRQAPGKCLEWVAFIWYDGSNKYYADSVKGRFTISRDNSKNTLYLQMNSLRAEDTAVYYCARRAGIIGTIGYYYGMDVWGQGTTVTVSSGGGGSGGGGSGGGGSSYELTQPPSVSVSPGQTASITCSGDRLGEKYTSWYQQRPGQSPLLVIYQDTKRPSGIPERFSGSNSGNTATLTISGTQAMDEADYYCQAWESSTVVFGCGTKLTVL

SEQ ID NO: 167 - protein, 501 aa, Artificial Sequence
  Synthetic peptide
QVQLVESGGGVVQPGGSLRLSCAASGFTFSSYGMHWVRQAPGKCLEWVAFIWYDGSNKYYADSVKGRFTISRDNSKNTLYLQMNSLRAEDTAVYYCARRAGIIGTIGYYYGMDVWGQGTTVTVSSGGGGSGGGGSGGGGSSYELTQPPSVSVSPGQTASITCSGDRLGEKYTSWYQQRPGQSPLLVIYQDTKRPSGIPERFSGSNSGNTATLTISGTQAMDEADYYCQAWESSTVVFGCGTKLTVLSGGGGSEVQLVESGGGLVQPGGSLKLSCAASGFTFNKYAMNWVRQAPGKGLEWVARIRSKYNNYATYYADSVKDRFTISRDDSKNTAYLQMNNLKTEDTAVYYCVRHGNFGNSYISYWAYWGQGTLVTVSSGGGGSGGGGSGGGGSQTVVTQEPSLTVSPGGTVTLTCGSSTGAVTSGNYPNWVQQKPGQAPRGLIGGTKFLAPGTPARFSGSLLGGKAALTLSGVQPEDEAEYYCVLWYSNRWVFGGGTKLTVL

SEQ ID NO: 168 - protein, 989 aa, Artificial Sequence
  Synthetic peptide
QVQLVESGGGVVQPGGSLRLSCAASGFTFSSYGMHWVRQAPGKCLEWVAFIWYDGSNKYYADSVKGRFTISRDNSKNTLYLQMNSLRAEDTAVYYCARRAGIIGTIGYYYGMDVWGQGTTVTVSSGGGGSGGGGSGGGGSSYELTQPPSVSVSPGQTASITCSGDRLGEKYTSWYQQRPGQSPLLVIYQDTKRPSGIPERFSGSNSGNTATLTISGTQAMDEADYYCQAWESSTVVFGCGTKLTVLSGGGGSEVQLVESGGGLVQPGGSLKLSCAASGFTFNKYAMNWVRQAPGKGLEWVARIRSKYNNYATYYADSVKDRFTISRDDSKNTAYLQMNNLKTEDTAVYYCVRHGNFGNSYISYWAYWGQGTLVTVSSGGGGSGGGGSGGGGSQTVVTQEPSLTVSPGGTVTLTCGSSTGAVTSGNYPNWVQQKPGQAPRGLIGGTKFLAPGTPARFSGSLLGGKAALTLSGVQPEDEAEYYCVLWYSNRWVFGGGTKLTVLGGGGDKTHTCPPCPAPELLGGPSVFLFPPKPKDTLMISRTPEVTCVVVDVSHEDPEVKFNWYVDGVEVHNAKTKPCEEQYGSTYRCVSVLTVLHQDWLNGKEYKCKVSNKALPAPIEKTISKAKGQPREPQVYTLPPSREEMTKNQVSLTCLVKGFYPSDIAVEWESNGQPENNYKTTPPVLDSDGSFFLYSKLTVDKSRWQQGNVFSCSVMHEALHNHYTQKSLSLSPGKGGGGSGGGGSGGGGSGGGGSGGGGSGGGGSDKTHTCPPCPAPELLGGPSVFLFPPKPKDTLMISRTPEVTCVVVDVSHEDPEVKFNWYVDGVEVHNAKTKPCEEQYGSTYRCVSVLTVLHQDWLNGKEYKCKVSNKALPAPIEKTISKAKGQPREPQVYTLPPSREEMTKNQVSLTCLVKGFYPSDIAVEWESNGQPENNYKTTPPVLDSDGSFFLYSKLTVDKSRWQQGNVFSCSVMHEALHNHYTQKSLSLSPGK

SEQ ID NO: 169 - protein, 987 aa, Artificial Sequence
  Synthetic peptide
QVQLVESGGGVVQPGGSLRLSCAASGFTFSSYGMHWVRQAPGKCLEWVAFIWYDGSNKYYADSVKGRFTISRDNSKNTLYLQMNSLRAEDTAVYYCARRAGIIGTIGYYYGMDVWGQGTTVTVSSGGGGSGGGGSGGGGSSYELTQPPSVSVSPGQTASITCSGDRLGEKYTSWYQQRPGQSPLLVIYQDTKRPSGIPERFSGSNSGNTATLTISGTQAMDEADYYCQAWESSTVVFGCGTKLTVLSGGGGSEVQLVESGGGLVQPGGSLKLSCAASGFTFNKYAMNWVRQAPGKGLEWVARIRSKYNNYATYYADSVKDRFTISRDDSKNTAYLQMNNLKTEDTAVYYCVRHGNFGNSYISYWAYWGQGTLVTVSSGGGGSGGGGSGGGGSQTVVTQEPSLTVSPGGTVTLTCGSSTGAVTSGNYPNWVQQKPGQAPRGLIGGTKFLAPGTPARFSGSLLGGKAALTLSGVQPEDEAEYYCVLWYSNRWVFGGGTKLTVLGGGGDKTHTCPPCPAPELLGGPSVFLFPPKPKDTLMISRTPEVTCVVVDVSHEDPEVKFNWYVDGVEVHNAKTKPCEEQYGSTYRCVSVLTVLHQDWLNGKEYKCKVSNKALPAPIEKTISKAKGQPREPQVYTLPPSREEMTKNQVSLTCLVKGFYPSDIAVEWESNGQPENNYKTTPPVLDSDGSFFLYSKLTVDKSRWQQGNVFSCSVMHEALHNHYTQKSLSLSPGGGGSGGGGSGGGGSGGGGSGGGGSGGGGSDKTHTCPPCPAPELLGGPSVFLFPPKPKDTLMISRTPEVTCVVVDVSHEDPEVKFNWYVDGVEVHNAKTKPCEEQYGSTYRCVSVLTVLHQDWLNGKEYKCKVSNKALPAPIEKTISKAKGQPREPQVYTLPPSREEMTKNQVSLTCLVKGFYPSDIAVEWESNGQPENNYKTTPPVLDSDGSFFLYSKLTVDKSRWQQGNVFSCSVMHEALHNHYTQKSLSLSPGK

SEQ ID NO: 170 - protein, 5 aa, Artificial Sequence
  Synthetic peptide
SYGMH

SEQ ID NO: 171 - protein, 17 aa, Artificial Sequence
  Synthetic peptide
FIWYEGSNKYYAESVKD

SEQ ID NO: 172 - protein, 16 aa, Artificial Sequence
  Synthetic peptide
RAGIIGTIGYYYGMDV

SEQ ID NO: 173 - protein, 11 aa, Artificial Sequence
  Synthetic peptide
SGDRLGEKYTS

SEQ ID NO: 174 - protein, 7 aa, Artificial Sequence
  Synthetic peptide
QDTKRPS

SEQ ID NO: 175 - protein, 9 aa, Artificial Sequence
  Synthetic peptide
QAWESSTVV

SEQ ID NO: 176 - protein, 125 aa, Artificial Sequence
  Synthetic peptide
QVQLVESGGGVVQPGGSLRLSCAASGFTFSSYGMHWVRQAPGKGLEWVAFIWYEGSNKYYAESVKDRFTISRDNSKNTLYLQMNSLRAEDTAVYYCARRAGIIGTIGYYYGMDVWGQGTTVTVSS

SEQ ID NO: 177 - protein, 106 aa, Artificial Sequence; identical to SEQ ID NO: 141
  Synthetic peptide

SEQ ID NO: 178 - protein, 246 aa, Artificial Sequence
  Synthetic peptide
QVQLVESGGGVVQPGGSLRLSCAASGFTFSSYGMHWVRQAPGKGLEWVAFIWYEGSNKYYAESVKDRFTISRDNSKNTLYLQMNSLRAEDTAVYYCARRAGIIGTIGYYYGMDVWGQGTTVTVSSGGGGSGGGGSGGGGSSYELTQPPSVSVSPGQTASITCSGDRLGEKYTSWYQQRPGQSPLLVIYQDTKRPSGIPERFSGSNSGNTATLTISGTQAMDEADYYCQAWESSTVVFGGGTKLTVL

SEQ ID NO: 179 - protein, 501 aa, Artificial Sequence
  Synthetic peptide
QVQLVESGGGVVQPGGSLRLSCAASGFTFSSYGMHWVRQAPGKGLEWVAFIWYEGSNKYYAESVKDRFTISRDNSKNTLYLQMNSLRAEDTAVYYCARRAGIIGTIGYYYGMDVWGQGTTVTVSSGGGGSGGGGSGGGGSSYELTQPPSVSVSPGQTASITCSGDRLGEKYTSWYQQRPGQSPLLVIYQDTKRPSGIPERFSGSNSGNTATLTISGTQAMDEADYYCQAWESSTVVFGGGTKLTVLSGGGGSEVQLVESGGGLVQPGGSLKLSCAASGFTFNKYAMNWVRQAPGKGLEWVARIRSKYNNYATYYADSVKDRFTISRDDSKNTAYLQMNNLKTEDTAVYYCVRHGNFGNSYISYWAYWGQGTLVTVSSGGGGSGGGGSGGGGSQTVVTQEPSLTVSPGGTVTLTCGSSTGAVTSGNYPNWVQQKPGQAPRGLIGGTKFLAPGTPARFSGSLLGGKAALTLSGVQPEDEAEYYCVLWYSNRWVFGGGTKLTVL

SEQ ID NO: 180 - protein, 989 aa, Artificial Sequence
  Synthetic peptide
QVQLVESGGGVVQPGGSLRLSCAASGFTFSSYGMHWVRQAPGKGLEWVAFIWYEGSNKYYAESVKDRFTISRDNSKNTLYLQMNSLRAEDTAVYYCARRAGIIGTIGYYYGMDVWGQGTTVTVSSGGGGSGGGGSGGGGSSYELTQPPSVSVSPGQTASITCSGDRLGEKYTSWYQQRPGQSPLLVIYQDTKRPSGIPERFSGSNSGNTATLTISGTQAMDEADYYCQAWESSTVVFGGGTKLTVLSGGGGSEVQLVESGGGLVQPGGSLKLSCAASGFTFNKYAMNWVRQAPGKGLEWVARIRSKYNNYATYYADSVKDRFTISRDDSKNTAYLQMNNLKTEDTAVYYCVRHGNFGNSYISYWAYWGQGTLVTVSSGGGGSGGGGSGGGGSQTVVTQEPSLTVSPGGTVTLTCGSSTGAVTSGNYPNWVQQKPGQAPRGLIGGTKFLAPGTPARFSGSLLGGKAALTLSGVQPEDEAEYYCVLWYSNRWVFGGGTKLTVLGGGGDKTHTCPPCPAPELLGGPSVFLFPPKPKDTLMISRTPEVTCVVVDVSHEDPEVKFNWYVDGVEVHNAKTKPCEEQYGSTYRCVSVLTVLHQDWLNGKEYKCKVSNKALPAPIEKTISKAKGQPREPQVYTLPPSREEMTKNQVSLTCLVKGFYPSDIAVEWESNGQPENNYKTTPPVLDSDGSFFLYSKLTVDKSRWQQGNVFSCSVMHEALHNHYTQKSLSLSPGKGGGGSGGGGSGGGGSGGGGSGGGGSGGGGSDKTHTCPPCPAPELLGGPSVFLFPPKPKDTLMISRTPEVTCVVVDVSHEDPEVKFNWYVDGVEVHNAKTKPCEEQYGSTYRCVSVLTVLHQDWLNGKEYKCKVSNKALPAPIEKTISKAKGQPREPQVYTLPPSREEMTKNQVSLTCLVKGFYPSDIAVEWESNGQPENNYKTTPPVLDSDGSFFLYSKLTVDKSRWQQGNVFSCSVMHEALHNHYTQKSLSLSPGK

SEQ ID NO: 181 - protein, 987 aa, Artificial Sequence
  Synthetic peptide
QVQLVESGGGVVQPGGSLRLSCAASGFTFSSYGMHWVRQAPGKGLEWVAFIWYEGSNKYYAESVKDRFTISRDNSKNTLYLQMNSLRAEDTAVYYCARRAGIIGTIGYYYGMDVWGQGTTVTVSSGGGGSGGGGSGGGGSSYELTQPPSVSVSPGQTASITCSGDRLGEKYTSWYQQRPGQSPLLVIYQDTKRPSGIPERFSGSNSGNTATLTISGTQAMDEADYYCQAWESSTVVFGGGTKLTVLSGGGGSEVQLVESGGGLVQPGGSLKLSCAASGFTFNKYAMNWVRQAPGKGLEWVARIRSKYNNYATYYADSVKDRFTISRDDSKNTAYLQMNNLKTEDTAVYYCVRHGNFGNSYISYWAYWGQGTLVTVSSGGGGSGGGGSGGGGSQTVVTQEPSLTVSPGGTVTLTCGSSTGAVTSGNYPNWVQQKPGQAPRGLIGGTKFLAPGTPARFSGSLLGGKAALTLSGVQPEDEAEYYCVLWYSNRWVFGGGTKLTVLGGGGDKTHTCPPCPAPELLGGPSVFLFPPKPKDTLMISRTPEVTCVVVDVSHEDPEVKFNWYVDGVEVHNAKTKPCEEQYGSTYRCVSVLTVLHQDWLNGKEYKCKVSNKALPAPIEKTISKAKGQPREPQVYTLPPSREEMTKNQVSLTCLVKGFYPSDIAVEWESNGQPENNYKTTPPVLDSDGSFFLYSKLTVDKSRWQQGNVFSCSVMHEALHNHYTQKSLSLSPGGGGSGGGGSGGGGSGGGGSGGGGSGGGGSDKTHTCPPCPAPELLGGPSVFLFPPKPKDTLMISRTPEVTCVVVDVSHEDPEVKFNWYVDGVEVHNAKTKPCEEQYGSTYRCVSVLTVLHQDWLNGKEYKCKVSNKALPAPIEKTISKAKGQPREPQVYTLPPSREEMTKNQVSLTCLVKGFYPSDIAVEWESNGQPENNYKTTPPVLDSDGSFFLYSKLTVDKSRWQQGNVFSCSVMHEALHNHYTQKSLSLSPGK

SEQ ID NO: 182 - protein, 125 aa, Artificial Sequence
  Synthetic peptide
QVQLVESGGGVVQPGGSLRLSCAASGFTFSSYGMHWVRQAPGKCLEWVAFIWYEGSNKYYAESVKDRFTISRDNSKNTLYLQMNSLRAEDTAVYYCARRAGIIGTIGYYYGMDVWGQGTTVTVSS

SEQ ID NO: 183 - protein, 106 aa, Artificial Sequence; identical to SEQ ID NO: 147
  Synthetic peptide

SEQ ID NO: 184 - protein, 246 aa, Artificial Sequence
  Synthetic peptide
QVQLVESGGGVVQPGGSLRLSCAASGFTFSSYGMHWVRQAPGKCLEWVAFIWYEGSNKYYAESVKDRFTISRDNSKNTLYLQMNSLRAEDTAVYYCARRAGIIGTIGYYYGMDVWGQGTTVTVSSGGGGSGGGGSGGGGSSYELTQPPSVSVSPGQTASITCSGDRLGEKYTSWYQQRPGQSPLLVIYQDTKRPSGIPERFSGSNSGNTATLTISGTQAMDEADYYCQAWESSTVVFGCGTKLTVL

SEQ ID NO: 185 - protein, 501 aa, Artificial Sequence
  Synthetic peptide
QVQLVESGGGVVQPGGSLRLSCAASGFTFSSYGMHWVRQAPGKCLEWVAFIWYEGSNKYYAESVKDRFTISRDNSKNTLYLQMNSLRAEDTAVYYCARRAGIIGTIGYYYGMDVWGQGTTVTVSSGGGGSGGGGSGGGGSSYELTQPPSVSVSPGQTASITCSGDRLGEKYTSWYQQRPGQSPLLVIYQDTKRPSGIPERFSGSNSGNTATLTISGTQAMDEADYYCQAWESSTVVFGCGTKLTVLSGGGGSEVQLVESGGGLVQPGGSLKLSCAASGFTFNKYAMNWVRQAPGKGLEWVARIRSKYNNYATYYADSVKDRFTISRDDSKNTAYLQMNNLKTEDTAVYYCVRHGNFGNSYISYWAYWGQGTLVTVSSGGGGSGGGGSGGGGSQTVVTQEPSLTVSPGGTVTLTCGSSTGAVTSGNYPNWVQQKPGQAPRGLIGGTKFLAPGTPARFSGSLLGGKAALTLSGVQPEDEAEYYCVLWYSNRWVFGGGTKLTVL

SEQ ID NO: 186 - protein, 989 aa, Artificial Sequence
  Synthetic peptide
QVQLVESGGGVVQPGGSLRLSCAASGFTFSSYGMHWVRQAPGKCLEWVAFIWYEGSNKYYAESVKDRFTISRDNSKNTLYLQMNSLRAEDTAVYYCARRAGIIGTIGYYYGMDVWGQGTTVTVSSGGGGSGGGGSGGGGSSYELTQPPSVSVSPGQTASITCSGDRLGEKYTSWYQQRPGQSPLLVIYQDTKRPSGIPERFSGSNSGNTATLTISGTQAMDEADYYCQAWESSTVVFGCGTKLTVLSGGGGSEVQLVESGGGLVQPGGSLKLSCAASGFTFNKYAMNWVRQAPGKGLEWVARIRSKYNNYATYYADSVKDRFTISRDDSKNTAYLQMNNLKTEDTAVYYCVRHGNFGNSYISYWAYWGQGTLVTVSSGGGGSGGGGSGGGGSQTVVTQEPSLTVSPGGTVTLTCGSSTGAVTSGNYPNWVQQKPGQAPRGLIGGTKFLAPGTPARFSGSLLGGKAALTLSGVQPEDEAEYYCVLWYSNRWVFGGGTKLTVLGGGGDKTHTCPPCPAPELLGGPSVFLFPPKPKDTLMISRTPEVTCVVVDVSHEDPEVKFNWYVDGVEVHNAKTKPCEEQYGSTYRCVSVLTVLHQDWLNGKEYKCKVSNKALPAPIEKTISKAKGQPREPQVYTLPPSREEMTKNQVSLTCLVKGFYPSDIAVEWESNGQPENNYKTTPPVLDSDGSFFLYSKLTVDKSRWQQGNVFSCSVMHEALHNHYTQKSLSLSPGKGGGGSGGGGSGGGGSGGGGSGGGGSGGGGSDKTHTCPPCPAPELLGGPSVFLFPPKPKDTLMISRTPEVTCVVVDVSHEDPEVKFNWYVDGVEVHNAKTKPCEEQYGSTYRCVSVLTVLHQDWLNGKEYKCKVSNKALPAPIEKTISKAKGQPREPQVYTLPPSREEMTKNQVSLTCLVKGFYPSDIAVEWESNGQPENNYKTTPPVLDSDGSFFLYSKLTVDKSRWQQGNVFSCSVMHEALHNHYTQKSLSLSPGK

SEQ ID NO: 187 - protein, 987 aa, Artificial Sequence
  Synthetic peptide
QVQLVESGGGVVQPGGSLRLSCAASGFTFSSYGMHWVRQAPGKCLEWVAFIWYEGSNKYYAESVKDRFTISRDNSKNTLYLQMNSLRAEDTAVYYCARRAGIIGTIGYYYGMDVWGQGTTVTVSSGGGGSGGGGSGGGGSSYELTQPPSVSVSPGQTASITCSGDRLGEKYTSWYQQRPGQSPLLVIYQDTKRPSGIPERFSGSNSGNTATLTISGTQAMDEADYYCQAWESSTVVFGCGTKLTVLSGGGGSEVQLVESGGGLVQPGGSLKLSCAASGFTFNKYAMNWVRQAPGKGLEWVARIRSKYNNYATYYADSVKDRFTISRDDSKNTAYLQMNNLKTEDTAVYYCVRHGNFGNSYISYWAYWGQGTLVTVSSGGGGSGGGGSGGGGSQTVVTQEPSLTVSPGGTVTLTCGSSTGAVTSGNYPNWVQQKPGQAPRGLIGGTKFLAPGTPARFSGSLLGGKAALTLSGVQPEDEAEYYCVLWYSNRWVFGGGTKLTVLGGGGDKTHTCPPCPAPELLGGPSVFLFPPKPKDTLMISRTPEVTCVVVDVSHEDPEVKFNWYVDGVEVHNAKTKPCEEQYGSTYRCVSVLTVLHQDWLNGKEYKCKVSNKALPAPIEKTISKAKGQPREPQVYTLPPSREEMTKNQVSLTCLVKGFYPSDIAVEWESNGQPENNYKTTPPVLDSDGSFFLYSKLTVDKSRWQQGNVFSCSVMHEALHNHYTQKSLSLSPGGGGSGGGGSGGGGSGGGGSGGGGSGGGGSDKTHTCPPCPAPELLGGPSVFLFPPKPKDTLMISRTPEVTCVVVDVSHEDPEVKFNWYVDGVEVHNAKTKPCEEQYGSTYRCVSVLTVLHQDWLNGKEYKCKVSNKALPAPIEKTISKAKGQPREPQVYTLPPSREEMTKNQVSLTCLVKGFYPSDIAVEWESNGQPENNYKTTPPVLDSDGSFFLYSKLTVDKSRWQQGNVFSCSVMHEALHNHYTQKSLSLSPGK

SEQ ID NO: 188 - protein, 5 aa, Artificial Sequence
  Synthetic peptide
SYYWS

SEQ ID NO: 189 - protein, 16 aa, Artificial Sequence
  Synthetic peptide
YVYYSGTTNYNPSLKS

SEQ ID NO: 190 - protein, 10 aa, Artificial Sequence
  Synthetic peptide
IAVTGFYFDY

SEQ ID NO: 191 - protein, 12 aa, Artificial Sequence
  Synthetic peptide
RASQRVNNNYLA

SEQ ID NO: 192 - protein, 7 aa, Artificial Sequence
  Synthetic peptide
GASSRAT

SEQ ID NO: 193 - protein, 9 aa, Artificial Sequence
  Synthetic peptide
QQYDRSPLT

SEQ ID NO: 194 - protein, 118 aa, Artificial Sequence
  Synthetic peptide
QVQLQESGPGLVKPSETLSLTCTVSGGSISSYYWSWIRQPPGKGLEWIGYVYYSGTTNYNPSLKSRVTISVDTSKNQFSLKLSSVTAADTAVYYCASIAVTGFYFDYWGQGTLVTVSS

SEQ ID NO: 195 - protein, 108 aa, Artificial Sequence
  Synthetic peptide
EIVLTQSPGTLSLSPGERVTLSCRASQRVNNNYLAWYQQRPGQAPRLLIYGASSRATGIPDRFSGSGSGTDFTLTISRLEPEDFAVYYCQQYDRSPLTFGGGTKLEIK

SEQ ID NO: 196 - protein, 241 aa, Artificial Sequence
  Synthetic peptide
QVQLQESGPGLVKPSETLSLTCTVSGGSISSYYWSWIRQPPGKGLEWIGYVYYSGTTNYNPSLKSRVTISVDTSKNQFSLKLSSVTAADTAVYYCASIAVTGFYFDYWGQGTLVTVSSGGGGSGGGGSGGGGSEIVLTQSPGTLSLSPGERVTLSCRASQRVNNNYLAWYQQRPGQAPRLLIYGASSRATGIPDRFSGSGSGTDFTLTISRLEPEDFAVYYCQQYDRSPLTFGGGTKLEIK

SEQ ID NO: 197 - protein, 496 aa, Artificial Sequence
  Synthetic peptide
QVQLQESGPGLVKPSETLSLTCTVSGGSISSYYWSWIRQPPGKGLEWIGYVYYSGTTNYNPSLKSRVTISVDTSKNQFSLKLSSVTAADTAVYYCASIAVTGFYFDYWGQGTLVTVSSGGGGSGGGGSGGGGSEIVLTQSPGTLSLSPGERVTLSCRASQRVNNNYLAWYQQRPGQAPRLLIYGASSRATGIPDRFSGSGSGTDFTLTISRLEPEDFAVYYCQQYDRSPLTFGGGTKLEIKSGGGGSEVQLVESGGGLVQPGGSLKLSCAASGFTFNKYAMNWVRQAPGKGLEWVARIRSKYNNYATYYADSVKDRFTISRDDSKNTAYLQMNNLKTEDTAVYYCVRHGNFGNSYISYWAYWGQGTLVTVSSGGGGSGGGGSGGGGSQTVVTQEPSLTVSPGGTVTLTCGSSTGAVTSGNYPNWVQQKPGQAPRGLIGGTKFLAPGTPARFSGSLLGGKAALTLSGVQPEDEAEYYCVLWYSNRWVFGGGTKLTVL

SEQ ID NO: 198 - protein, 984 aa, Artificial Sequence
  Synthetic peptide
QVQLQESGPGLVKPSETLSLTCTVSGGSISSYYWSWIRQPPGKGLEWIGYVYYSGTTNYNPSLKSRVTISVDTSKNQFSLKLSSVTAADTAVYYCASIAVTGFYFDYWGQGTLVTVSSGGGGSGGGGSGGGGSEIVLTQSPGTLSLSPGERVTLSCRASQRVNNNYLAWYQQRPGQAPRLLIYGASSRATGIPDRFSGSGSGTDFTLTISRLEPEDFAVYYCQQYDRSPLTFGGGTKLEIKSGGGGSEVQLVESGGGLVQPGGSLKLSCAASGFTFNKYAMNWVRQAPGKGLEWVARIRSKYNNYATYYADSVKDRFTISRDDSKNTAYLQMNNLKTEDTAVYYCVRHGNFGNSYISYWAYWGQGTLVTVSSGGGGSGGGGSGGGGSQTVVTQEPSLTVSPGGTVTLTCGSSTGAVTSGNYPNWVQQKPGQAPRGLIGGTKFLAPGTPARFSGSLLGGKAALTLSGVQPEDEAEYYCVLWYSNRWVFGGGTKLTVLGGGGDKTHTCPPCPAPELLGGPSVFLFPPKPKDTLMISRTPEVTCVVVDVSHEDPEVKFNWYVDGVEVHNAKTKPCEEQYGSTYRCVSVLTVLHQDWLNGKEYKCKVSNKALPAPIEKTISKAKGQPREPQVYTLPPSREEMTKNQVSLTCLVKGFYPSDIAVEWESNGQPENNYKTTPPVLDSDGSFFLYSKLTVDKSRWQQGNVFSCSVMHEALHNHYTQKSLSLSPGKGGGGSGGGGSGGGGSGGGGSGGGGSGGGGSDKTHTCPPCPAPELLGGPSVFLFPPKPKDTLMISRTPEVTCVVVDVSHEDPEVKFNWYVDGVEVHNAKTKPCEEQYGSTYRCVSVLTVLHQDWLNGKEYKCKVSNKALPAPIEKTISKAKGQPREPQVYTLPPSREEMTKNQVSLTCLVKGFYPSDIAVEWESNGQPENNYKTTPPVLDSDGSFFLYSKLTVDKSRWQQGNVFSCSVMHEALHNHYTQKSLSLSPGK

SEQ ID NO: 199 - protein, 982 aa, Artificial Sequence
  Synthetic peptide
QVQLQESGPGLVKPSETLSLTCTVSGGSISSYYWSWIRQPPGKGLEWIGYVYYSGTTNYNPSLKSRVTISVDTSKNQFSLKLSSVTAADTAVYYCASIAVTGFYFDYWGQGTLVTVSSGGGGSGGGGSGGGGSEIVLTQSPGTLSLSPGERVTLSCRASQRVNNNYLAWYQQRPGQAPRLLIYGASSRATGIPDRFSGSGSGTDFTLTISRLEPEDFAVYYCQQYDRSPLTFGGGTKLEIKSGGGGSEVQLVESGGGLVQPGGSLKLSCAASGFTFNKYAMNWVRQAPGKGLEWVARIRSKYNNYATYYADSVKDRFTISRDDSKNTAYLQMNNLKTEDTAVYYCVRHGNFGNSYISYWAYWGQGTLVTVSSGGGGSGGGGSGGGGSQTVVTQEPSLTVSPGGTVTLTCGSSTGAVTSGNYPNWVQQKPGQAPRGLIGGTKFLAPGTPARFSGSLLGGKAALTLSGVQPEDEAEYYCVLWYSNRWVFGGGTKLTVLGGGGDKTHTCPPCPAPELLGGPSVFLFPPKPKDTLMISRTPEVTCVVVDVSHEDPEVKFNWYVDGVEVHNAKTKPCEEQYGSTYRCVSVLTVLHQDWLNGKEYKCKVSNKALPAPIEKTISKAKGQPREPQVYTLPPSREEMTKNQVSLTCLVKGFYPSDIAVEWESNGQPENNYKTTPPVLDSDGSFFLYSKLTVDKSRWQQGNVFSCSVMHEALHNHYTQKSLSLSPGGGGSGGGGSGGGGSGGGGSGGGGSGGGGSDKTHTCPPCPAPELLGGPSVFLFPPKPKDTLMISRTPEVTCVVVDVSHEDPEVKFNWYVDGVEVHNAKTKPCEEQYGSTYRCVSVLTVLHQDWLNGKEYKCKVSNKALPAPIEKTISKAKGQPREPQVYTLPPSREEMTKNQVSLTCLVKGFYPSDIAVEWESNGQPENNYKTTPPVLDSDGSFFLYSKLTVDKSRWQQGNVFSCSVMHEALHNHYTQKSLSLSPGK

SEQ ID NO: 200 - protein, 118 aa, Artificial Sequence
  Synthetic peptide
QVQLQESGPGLVKPSETLSLTCTVSGGSISSYYWSWIRQPPGKCLEWIGYVYYSGTTNYNPSLKSRVTISVDTSKNQFSLKLSSVTAADTAVYYCASIAVTGFYFDYWGQGTLVTVSS

SEQ ID NO: 201 - protein, 108 aa, Artificial Sequence
  Synthetic peptide
EIVLTQSPGTLSLSPGERVTLSCRASQRVNNNYLAWYQQRPGQAPRLLIYGASSRATGIPDRFSGSGSGTDFTLTISRLEPEDFAVYYCQQYDRSPLTFGCGTKLEIK

SEQ ID NO: 202 - protein, 241 aa, Artificial Sequence
  Synthetic peptide
QVQLQESGPGLVKPSETLSLTCTVSGGSISSYYWSWIRQPPGKCLEWIGYVYYSGTTNYNPSLKSRVTISVDTSKNQFSLKLSSVTAADTAVYYCASIAVTGFYFDYWGQGTLVTVSSGGGGSGGGGSGGGGSEIVLTQSPGTLSLSPGERVTLSCRASQRVNNNYLAWYQQRPGQAPRLLIYGASSRATGIPDRFSGSGSGTDFTLTISRLEPEDFAVYYCQQYDRSPLTFGCGTKLEIK

SEQ ID NO: 203 - protein, 496 aa, Artificial Sequence
  Synthetic peptide
QVQLQESGPGLVKPSETLSLTCTVSGGSISSYYWSWIRQPPGKCLEWIGYVYYSGTTNYNPSLKSRVTISVDTSKNQFSLKLSSVTAADTAVYYCASIAVTGFYFDYWGQGTLVTVSSGGGGSGGGGSGGGGSEIVLTQSPGTLSLSPGERVTLSCRASQRVNNNYLAWYQQRPGQAPRLLIYGASSRATGIPDRFSGSGSGTDFTLTISRLEPEDFAVYYCQQYDRSPLTFGCGTKLEIKSGGGGSEVQLVESGGGLVQPGGSLKLSCAASGFTFNKYAMNWVRQAPGKGLEWVARIRSKYNNYATYYADSVKDRFTISRDDSKNTAYLQMNNLKTEDTAVYYCVRHGNFGNSYISYWAYWGQGTLVTVSSGGGGSGGGGSGGGGSQTVVTQEPSLTVSPGGTVTLTCGSSTGAVTSGNYPNWVQQKPGQAPRGLIGGTKFLAPGTPARFSGSLLGGKAALTLSGVQPEDEAEYYCVLWYSNRWVFGGGTKLTVL

SEQ ID NO: 204 - protein, 984 aa, Artificial Sequence
  Synthetic peptide
QVQLQESGPGLVKPSETLSLTCTVSGGSISSYYWSWIRQPPGKCLEWIGYVYYSGTTNYNPSLKSRVTISVDTSKNQFSLKLSSVTAADTAVYYCASIAVTGFYFDYWGQGTLVTVSSGGGGSGGGGSGGGGSEIVLTQSPGTLSLSPGERVTLSCRASQRVNNNYLAWYQQRPGQAPRLLIYGASSRATGIPDRFSGSGSGTDFTLTISRLEPEDFAVYYCQQYDRSPLTFGCGTKLEIKSGGGGSEVQLVESGGGLVQPGGSLKLSCAASGFTFNKYAMNWVRQAPGKGLEWVARIRSKYNNYATYYADSVKDRFTISRDDSKNTAYLQMNNLKTEDTAVYYCVRHGNFGNSYISYWAYWGQGTLVTVSSGGGGSGGGGSGGGGSQTVVTQEPSLTVSPGGTVTLTCGSSTGAVTSGNYPNWVQQKPGQAPRGLIGGTKFLAPGTPARFSGSLLGGKAALTLSGVQPEDEAEYYCVLWYSNRWVFGGGTKLTVLGGGGDKTHTCPPCPAPELLGGPSVFLFPPKPKDTLMISRTPEVTCVVVDVSHEDPEVKFNWYVDGVEVHNAKTKPCEEQYGSTYRCVSVLTVLHQDWLNGKEYKCKVSNKALPAPIEKTISKAKGQPREPQVYTLPPSREEMTKNQVSLTCLVKGFYPSDIAVEWESNGQPENNYKTTPPVLDSDGSFFLYSKLTVDKSRWQQGNVFSCSVMHEALHNHYTQKSLSLSPGKGGGGSGGGGSGGGGSGGGGSGGGGSGGGGSDKTHTCPPCPAPELLGGPSVFLFPPKPKDTLMISRTPEVTCVVVDVSHEDPEVKFNWYVDGVEVHNAKTKPCEEQYGSTYRCVSVLTVLHQDWLNGKEYKCKVSNKALPAPIEKTISKAKGQPREPQVYTLPPSREEMTKNQVSLTCLVKGFYPSDIAVEWESNGQPENNYKTTPPVLDSDGSFFLYSKLTVDKSRWQQGNVFSCSVMHEALHNHYTQKSLSLSPGK

SEQ ID NO: 205 - protein, 982 aa, Artificial Sequence
  Synthetic peptide
QVQLQESGPGLVKPSETLSLTCTVSGGSISSYYWSWIRQPPGKCLEWIGYVYYSGTTNYNPSLKSRVTISVDTSKNQFSLKLSSVTAADTAVYYCASIAVTGFYFDYWGQGTLVTVSSGGGGSGGGGSGGGGSEIVLTQSPGTLSLSPGERVTLSCRASQRVNNNYLAWYQQRPGQAPRLLIYGASSRATGIPDRFSGSGSGTDFTLTISRLEPEDFAVYYCQQYDRSPLTFGCGTKLEIKSGGGGSEVQLVESGGGLVQPGGSLKLSCAASGFTFNKYAMNWVRQAPGKGLEWVARIRSKYNNYATYYADSVKDRFTISRDDSKNTAYLQMNNLKTEDTAVYYCVRHGNFGNSYISYWAYWGQGTLVTVSSGGGGSGGGGSGGGGSQTVVTQEPSLTVSPGGTVTLTCGSSTGAVTSGNYPNWVQQKPGQAPRGLIGGTKFLAPGTPARFSGSLLGGKAALTLSGVQPEDEAEYYCVLWYSNRWVFGGGTKLTVLGGGGDKTHTCPPCPAPELLGGPSVFLFPPKPKDTLMISRTPEVTCVVVDVSHEDPEVKFNWYVDGVEVHNAKTKPCEEQYGSTYRCVSVLTVLHQDWLNGKEYKCKVSNKALPAPIEKTISKAKGQPREPQVYTLPPSREEMTKNQVSLTCLVKGFYPSDIAVEWESNGQPENNYKTTPPVLDSDGSFFLYSKLTVDKSRWQQGNVFSCSVMHEALHNHYTQKSLSLSPGGGGSGGGGSGGGGSGGGGSGGGGSGGGGSDKTHTCPPCPAPELLGGPSVFLFPPKPKDTLMISRTPEVTCVVVDVSHEDPEVKFNWYVDGVEVHNAKTKPCEEQYGSTYRCVSVLTVLHQDWLNGKEYKCKVSNKALPAPIEKTISKAKGQPREPQVYTLPPSREEMTKNQVSLTCLVKGFYPSDIAVEWESNGQPENNYKTTPPVLDSDGSFFLYSKLTVDKSRWQQGNVFSCSVMHEALHNHYTQKSLSLSPGK

SEQ ID NO: 206 - protein, 5 aa, Artificial Sequence
  Synthetic peptide
SFYWS

SEQ ID NO: 207 - protein, 16 aa, Artificial Sequence
  Synthetic peptide
YIYYSGTTNYNPSLKS

SEQ ID NO: 208 - protein, 10 aa, Artificial Sequence
  Synthetic peptide
IAVAGFFFDY

SEQ ID NO: 209 - protein, 12 aa, Artificial Sequence
  Synthetic peptide
RASQSVNKNYLA

SEQ ID NO: 210 - protein, 7 aa, Artificial Sequence
  Synthetic peptide
GASSRAT

SEQ ID NO: 211 - protein, 9 aa, Artificial Sequence
  Synthetic peptide
QQYDRSPLT

SEQ ID NO: 212 - protein, 118 aa, Artificial Sequence
  Synthetic peptide
QVQLQESGPGLVKPSETLSLTCTVSGASISSFYWSWIRQPPGKGLEWIGYIYYSGTTNYNPSLKSRVTISVDTSKNQFSLKLSSVTAADTAVYYCARIAVAGFFFDYWGQGTLVTVSS

SEQ ID NO: 213 - protein, 108 aa, Artificial Sequence
  Synthetic peptide
EIVLTQSPGTLSLSPGERATLSCRASQSVNKNYLAWYQQKPGQAPRLLIYGASSRATGIPDRFSGSGSGTDFTLTISRLEPEDFAVYYCQQYDRSPLTFGGGTKVEIK

SEQ ID NO: 214 - protein, 241 aa, Artificial Sequence
  Synthetic peptide
QVQLQESGPGLVKPSETLSLTCTVSGASISSFYWSWIRQPPGKGLEWIGYIYYSGTTNYNPSLKSRVTISVDTSKNQFSLKLSSVTAADTAVYYCARIAVAGFFFDYWGQGTLVTVSSGGGGSGGGGSGGGGSEIVLTQSPGTLSLSPGERATLSCRASQSVNKNYLAWYQQKPGQAPRLLIYGASSRATGIPDRFSGSGSGTDFTLTISRLEPEDFAVYYCQQYDRSPLTFGGGTKVEIK

SEQ ID NO: 215 - protein, 496 aa, Artificial Sequence
  Synthetic peptide
QVQLQESGPGLVKPSETLSLTCTVSGASISSFYWSWIRQPPGKGLEWIGYIYYSGTTNYNPSLKSRVTISVDTSKNQFSLKLSSVTAADTAVYYCARIAVAGFFFDYWGQGTLVTVSSGGGGSGGGGSGGGGSEIVLTQSPGTLSLSPGERATLSCRASQSVNKNYLAWYQQKPGQAPRLLIYGASSRATGIPDRFSGSGSGTDFTLTISRLEPEDFAVYYCQQYDRSPLTFGGGTKVEIKSGGGGSEVQLVESGGGLVQPGGSLKLSCAASGFTFNKYAMNWVRQAPGKGLEWVARIRSKYNNYATYYADSVKDRFTISRDDSKNTAYLQMNNLKTEDTAVYYCVRHGNFGNSYISYWAYWGQGTLVTVSSGGGGSGGGGSGGGGSQTVVTQEPSLTVSPGGTVTLTCGSSTGAVTSGNYPNWVQQKPGQAPRGLIGGTKFLAPGTPARFSGSLLGGKAALTLSGVQPEDEAEYYCVLWYSNRWVFGGGTKLTVL

SEQ ID NO: 216 - protein, 984 aa, Artificial Sequence
  Synthetic peptide
QVQLQESGPGLVKPSETLSLTCTVSGASISSFYWSWIRQPPGKGLEWIGYIYYSGTTNYNPSLKSRVTISVDTSKNQFSLKLSSVTAADTAVYYCARIAVAGFFFDYWGQGTLVTVSSGGGGSGGGGSGGGGSEIVLTQSPGTLSLSPGERATLSCRASQSVNKNYLAWYQQKPGQAPRLLIYGASSRATGIPDRFSGSGSGTDFTLTISRLEPEDFAVYYCQQYDRSPLTFGGGTKVEIKSGGGGSEVQLVESGGGLVQPGGSLKLSCAASGFTFNKYAMNWVRQAPGKGLEWVARIRSKYNNYATYYADSVKDRFTISRDDSKNTAYLQMNNLKTEDTAVYYCVRHGNFGNSYISYWAYWGQGTLVTVSSGGGGSGGGGSGGGGSQTVVTQEPSLTVSPGGTVTLTCGSSTGAVTSGNYPNWVQQKPGQAPRGLIGGTKFLAPGTPARFSGSLLGGKAALTLSGVQPEDEAEYYCVLWYSNRWVFGGGTKLTVLGGGGDKTHTCPPCPAPELLGGPSVFLFPPKPKDTLMISRTPEVTCVVVDVSHEDPEVKFNWYVDGVEVHNAKTKPCEEQYGSTYRCVSVLTVLHQDWLNGKEYKCKVSNKALPAPIEKTISKAKGQPREPQVYTLPPSREEMTKNQVSLTCLVKGFYPSDIAVEWESNGQPENNYKTTPPVLDSDGSFFLYSKLTVDKSRWQQGNVFSCSVMHEALHNHYTQKSLSLSPGKGGGGSGGGGSGGGGSGGGGSGGGGSGGGGSDKTHTCPPCPAPELLGGPSVFLFPPKPKDTLMISRTPEVTCVVVDVSHEDPEVKFNWYVDGVEVHNAKTKPCEEQYGSTYRCVSVLTVLHQDWLNGKEYKCKVSNKALPAPIEKTISKAKGQPREPQVYTLPPSREEMTKNQVSLTCLVKGFYPSDIAVEWESNGQPENNYKTTPPVLDSDGSFFLYSKLTVDKSRWQQGNVFSCSVMHEALHNHYTQKSLSLSPGK

SEQ ID NO: 217 - protein, 982 aa, Artificial Sequence
  Synthetic peptide
QVQLQESGPGLVKPSETLSLTCTVSGASISSFYWSWIRQPPGKGLEWIGYIYYSGTTNYNPSLKSRVTISVDTSKNQFSLKLSSVTAADTAVYYCARIAVAGFFFDYWGQGTLVTVSSGGGGSGGGGSGGGGSEIVLTQSPGTLSLSPGERATLSCRASQSVNKNYLAWYQQKPGQAPRLLIYGASSRATGIPDRFSGSGSGTDFTLTISRLEPEDFAVYYCQQYDRSPLTFGGGTKVEIKSGGGGSEVQLVESGGGLVQPGGSLKLSCAASGFTFNKYAMNWVRQAPGKGLEWVARIRSKYNNYATYYADSVKDRFTISRDDSKNTAYLQMNNLKTEDTAVYYCVRHGNFGNSYISYWAYWGQGTLVTVSSGGGGSGGGGSGGGGSQTVVTQEPSLTVSPGGTVTLTCGSSTGAVTSGNYPNWVQQKPGQAPRGLIGGTKFLAPGTPARFSGSLLGGKAALTLSGVQPEDEAEYYCVLWYSNRWVFGGGTKLTVLGGGGDKTHTCPPCPAPELLGGPSVFLFPPKPKDTLMISRTPEVTCVVVDVSHEDPEVKFNWYVDGVEVHNAKTKPCEEQYGSTYRCVSVLTVLHQDWLNGKEYKCKVSNKALPAPIEKTISKAKGQPREPQVYTLPPSREEMTKNQVSLTCLVKGFYPSDIAVEWESNGQPENNYKTTPPVLDSDGSFFLYSKLTVDKSRWQQGNVFSCSVMHEALHNHYTQKSLSLSPGGGGSGGGGSGGGGSGGGGSGGGGSGGGGSDKTHTCPPCPAPELLGGPSVFLFPPKPKDTLMISRTPEVTCVVVDVSHEDPEVKFNWYVDGVEVHNAKTKPCEEQYGSTYRCVSVLTVLHQDWLNGKEYKCKVSNKALPAPIEKTISKAKGQPREPQVYTLPPSREEMTKNQVSLTCLVKGFYPSDIAVEWESNGQPENNYKTTPPVLDSDGSFFLYSKLTVDKSRWQQGNVFSCSVMHEALHNHYTQKSLSLSPGK

SEQ ID NO: 218 - protein, 118 aa, Artificial Sequence
  Synthetic peptide
QVQLQESGPGLVKPSETLSLTCTVSGASISSFYWSWIRQPPGKCLEWIGYIYYSGTTNYNPSLKSRVTISVDTSKNQFSLKLSSVTAADTAVYYCARIAVAGFFFDYWGQGTLVTVSS

SEQ ID NO: 219 - protein, 108 aa, Artificial Sequence
  Synthetic peptide
EIVLTQSPGTLSLSPGERATLSCRASQSVNKNYLAWYQQKPGQAPRLLIYGASSRATGIPDRFSGSGSGTDFTLTISRLEPEDFAVYYCQQYDRSPLTFGCGTKVEIK

SEQ ID NO: 220 - protein, 241 aa, Artificial Sequence
  Synthetic peptide
QVQLQESGPGLVKPSETLSLTCTVSGASISSFYWSWIRQPPGKCLEWIGYIYYSGTTNYNPSLKSRVTISVDTSKNQFSLKLSSVTAADTAVYYCARIAVAGFFFDYWGQGTLVTVSSGGGGSGGGGSGGGGSEIVLTQSPGTLSLSPGERATLSCRASQSVNKNYLAWYQQKPGQAPRLLIYGASSRATGIPDRFSGSGSGTDFTLTISRLEPEDFAVYYCQQYDRSPLTFGCGTKVEIK

SEQ ID NO: 221 - protein, 496 aa, Artificial Sequence
  Synthetic peptide
QVQLQESGPGLVKPSETLSLTCTVSGASISSFYWSWIRQPPGKCLEWIGYIYYSGTTNYNPSLKSRVTISVDTSKNQFSLKLSSVTAADTAVYYCARIAVAGFFFDYWGQGTLVTVSSGGGGSGGGGSGGGGSEIVLTQSPGTLSLSPGERATLSCRASQSVNKNYLAWYQQKPGQAPRLLIYGASSRATGIPDRFSGSGSGTDFTLTISRLEPEDFAVYYCQQYDRSPLTFGCGTKVEIKSGGGGSEVQLVESGGGLVQPGGSLKLSCAASGFTFNKYAMNWVRQAPGKGLEWVARIRSKYNNYATYYADSVKDRFTISRDDSKNTAYLQMNNLKTEDTAVYYCVRHGNFGNSYISYWAYWGQGTLVTVSSGGGGSGGGGSGGGGSQTVVTQEPSLTVSPGGTVTLTCGSSTGAVTSGNYPNWVQQKPGQAPRGLIGGTKFLAPGTPARFSGSLLGGKAALTLSGVQPEDEAEYYCVLWYSNRWVFGGGTKLTVL

SEQ ID NO: 222 - protein, 984 aa, Artificial Sequence
  Synthetic peptide
QVQLQESGPGLVKPSETLSLTCTVSGASISSFYWSWIRQPPGKCLEWIGYIYYSGTTNYNPSLKSRVTISVDTSKNQFSLKLSSVTAADTAVYYCARIAVAGFFFDYWGQGTLVTVSSGGGGSGGGGSGGGGSEIVLTQSPGTLSLSPGERATLSCRASQSVNKNYLAWYQQKPGQAPRLLIYGASSRATGIPDRFSGSGSGTDFTLTISRLEPEDFAVYYCQQYDRSPLTFGCGTKVEIKSGGGGSEVQLVESGGGLVQPGGSLKLSCAASGFTFNKYAMNWVRQAPGKGLEWVARIRSKYNNYATYYADSVKDRFTISRDDSKNTAYLQMNNLKTEDTAVYYCVRHGNFGNSYISYWAYWGQGTLVTVSSGGGGSGGGGSGGGGSQTVVTQEPSLTVSPGGTVTLTCGSSTGAVTSGNYPNWVQQKPGQAPRGLIGGTKFLAPGTPARFSGSLLGGKAALTLSGVQPEDEAEYYCVLWYSNRWVFGGGTKLTVLGGGGDKTHTCPPCPAPELLGGPSVFLFPPKPKDTLMISRTPEVTCVVVDVSHEDPEVKFNWYVDGVEVHNAKTKPCEEQYGSTYRCVSVLTVLHQDWLNGKEYKCKVSNKALPAPIEKTISKAKGQPREPQVYTLPPSREEMTKNQVSLTCLVKGFYPSDIAVEWESNGQPENNYKTTPPVLDSDGSFFLYSKLTVDKSRWQQGNVFSCSVMHEALHNHYTQKSLSLSPGKGGGGSGGGGSGGGGSGGGGSGGGGSGGGGSDKTHTCPPCPAPELLGGPSVFLFPPKPKDTLMISRTPEVTCVVVDVSHEDPEVKFNWYVDGVEVHNAKTKPCEEQYGSTYRCVSVLTVLHQDWLNGKEYKCKVSNKALPAPIEKTISKAKGQPREPQVYTLPPSREEMTKNQVSLTCLVKGFYPSDIAVEWESNGQPENNYKTTPPVLDSDGSFFLYSKLTVDKSRWQQGNVFSCSVMHEALHNHYTQKSLSLSPGK

SEQ ID NO: 223 - protein, 982 aa, Artificial Sequence
  Synthetic peptide
QVQLQESGPGLVKPSETLSLTCTVSGASISSFYWSWIRQPPGKCLEWIGYIYYSGTTNYNPSLKSRVTISVDTSKNQFSLKLSSVTAADTAVYYCARIAVAGFFFDYWGQGTLVTVSSGGGGSGGGGSGGGGSEIVLTQSPGTLSLSPGERATLSCRASQSVNKNYLAWYQQKPGQAPRLLIYGASSRATGIPDRFSGSGSGTDFTLTISRLEPEDFAVYYCQQYDRSPLTFGCGTKVEIKSGGGGSEVQLVESGGGLVQPGGSLKLSCAASGFTFNKYAMNWVRQAPGKGLEWVARIRSKYNNYATYYADSVKDRFTISRDDSKNTAYLQMNNLKTEDTAVYYCVRHGNFGNSYISYWAYWGQGTLVTVSSGGGGSGGGGSGGGGSQTVVTQEPSLTVSPGGTVTLTCGSSTGAVTSGNYPNWVQQKPGQAPRGLIGGTKFLAPGTPARFSGSLLGGKAALTLSGVQPEDEAEYYCVLWYSNRWVFGGGTKLTVLGGGGDKTHTCPPCPAPELLGGPSVFLFPPKPKDTLMISRTPEVTCVVVDVSHEDPEVKFNWYVDGVEVHNAKTKPCEEQYGSTYRCVSVLTVLHQDWLNGKEYKCKVSNKALPAPIEKTISKAKGQPREPQVYTLPPSREEMTKNQVSLTCLVKGFYPSDIAVEWESNGQPENNYKTTPPVLDSDGSFFLYSKLTVDKSRWQQGNVFSCSVMHEALHNHYTQKSLSLSPGGGGSGGGGSGGGGSGGGGSGGGGSGGGGSDKTHTCPPCPAPELLGGPSVFLFPPKPKDTLMISRTPEVTCVVVDVSHEDPEVKFNWYVDGVEVHNAKTKPCEEQYGSTYRCVSVLTVLHQDWLNGKEYKCKVSNKALPAPIEKTISKAKGQPREPQVYTLPPSREEMTKNQVSLTCLVKGFYPSDIAVEWESNGQPENNYKTTPPVLDSDGSFFLYSKLTVDKSRWQQGNVFSCSVMHEALHNHYTQKSLSLSPGK

SEQ ID NO: 224 - protein, 5 aa, Artificial Sequence
  Synthetic peptide
NYYMH

SEQ ID NO: 225 - protein, 17 aa, Artificial Sequence
  Synthetic peptide
IINPSDGSTSYAQKFQG

SEQ ID NO: 226 - protein, 14 aa, Artificial Sequence
  Synthetic peptide
GGNSAFYSYYDMDV

SEQ ID NO: 227 - protein, 16 aa, Artificial Sequence
  Synthetic peptide
RSSQSLVYRDGNTYLS

SEQ ID NO: 228 - protein, 7 aa, Artificial Sequence
  Synthetic peptide
KVSNWQS

SEQ ID NO: 229 - protein, 9 aa, Artificial Sequence
  Synthetic peptide
MQGTHWPPT

SEQ ID NO: 230 - protein, 123 aa, Artificial Sequence
  Synthetic peptide
QVQLVQSGAEVKKPGASVKVSCKASGYTFTNYYMHWVRQAPGLGLEWMGIINPSDGSTSYAQKFQGRVTMTRDTSTNTVYMDLSSLRSEDTAVYYCARGGNSAFYSYYDMDVWGQGTTVTVSS

SEQ ID NO: 231 - protein, 112 aa, Artificial Sequence
  Synthetic peptide
DVVMTQTPLSLPVTLGQPASISCRSSQSLVYRDGNTYLSWFQQRPGQSPRRLIYKVSNWQSGVPDRFSGGGSGTDFTLKISRVEAEDVGVYYCMQGTHWPPTFGQGTKVEIK

SEQ ID NO: 232 - protein, 250 aa, Artificial Sequence
  Synthetic peptide
QVQLVQSGAEVKKPGASVKVSCKASGYTFTNYYMHWVRQAPGLGLEWMGIINPSDGSTSYAQKFQGRVTMTRDTSTNTVYMDLSSLRSEDTAVYYCARGGNSAFYSYYDMDVWGQGTTVTVSSGGGGSGGGGSGGGGSDVVMTQTPLSLPVTLGQPASISCRSSQSLVYRDGNTYLSWFQQRPGQSPRRLIYKVSNWQSGVPDRFSGGGSGTDFTLKISRVEAEDVGVYYCMQGTHWPPTFGQGTKVEIK

SEQ ID NO: 233 - protein, 505 aa, Artificial Sequence
  Synthetic peptide
QVQLVQSGAEVKKPGASVKVSCKASGYTFTNYYMHWVRQAPGLGLEWMGIINPSDGSTSYAQKFQGRVTMTRDTSTNTVYMDLSSLRSEDTAVYYCARGGNSAFYSYYDMDVWGQGTTVTVSSGGGGSGGGGSGGGGSDVVMTQTPLSLPVTLGQPASISCRSSQSLVYRDGNTYLSWFQQRPGQSPRRLIYKVSNWQSGVPDRFSGGGSGTDFTLKISRVEAEDVGVYYCMQGTHWPPTFGQGTKVEIKSGGGGSEVQLVESGGGLVQPGGSLKLSCAASGFTFNKYAMNWVRQAPGKGLEWVARIRSKYNNYATYYADSVKDRFTISRDDSKNTAYLQMNNLKTEDTAVYYCVRHGNFGNSYISYWAYWGQGTLVTVSSGGGGSGGGGSGGGGSQTVVTQEPSLTVSPGGTVTLTCGSSTGAVTSGNYPNWVQQKPGQAPRGLIGGTKFLAPGTPARFSGSLLGGKAALTLSGVQPEDEAEYYCVLWYSNRWVFGGGTKLTVL

SEQ ID NO: 234 - protein, 993 aa, Artificial Sequence
  Synthetic peptide
QVQLVQSGAEVKKPGASVKVSCKASGYTFTNYYMHWVRQAPGLGLEWMGIINPSDGSTSYAQKFQGRVTMTRDTSTNTVYMDLSSLRSEDTAVYYCARGGNSAFYSYYDMDVWGQGTTVTVSSGGGGSGGGGSGGGGSDVVMTQTPLSLPVTLGQPASISCRSSQSLVYRDGNTYLSWFQQRPGQSPRRLIYKVSNWQSGVPDRFSGGGSGTDFTLKISRVEAEDVGVYYCMQGTHWPPTFGQGTKVEIKSGGGGSEVQLVESGGGLVQPGGSLKLSCAASGFTFNKYAMNWVRQAPGKGLEWVARIRSKYNNYATYYADSVKDRFTISRDDSKNTAYLQMNNLKTEDTAVYYCVRHGNFGNSYISYWAYWGQGTLVTVSSGGGGSGGGGSGGGGSQTVVTQEPSLTVSPGGTVTLTCGSSTGAVTSGNYPNWVQQKPGQAPRGLIGGTKFLAPGTPARFSGSLLGGKAALTLSGVQPEDEAEYYCVLWYSNRWVFGGGTKLTVLGGGGDKTHTCPPCPAPELLGGPSVFLFPPKPKDTLMISRTPEVTCVVVDVSHEDPEVKFNWYVDGVEVHNAKTKPCEEQYGSTYRCVSVLTVLHQDWLNGKEYKCKVSNKALPAPIEKTISKAKGQPREPQVYTLPPSREEMTKNQVSLTCLVKGFYPSDIAVEWESNGQPENNYKTTPPVLDSDGSFFLYSKLTVDKSRWQQGNVFSCSVMHEALHNHYTQKSLSLSPGKGGGGSGGGGSGGGGSGGGGSGGGGSGGGGSDKTHTCPPCPAPELLGGPSVFLFPPKPKDTLMISRTPEVTCVVVDVSHEDPEVKFNWYVDGVEVHNAKTKPCEEQYGSTYRCVSVLTVLHQDWLNGKEYKCKVSNKALPAPIEKTISKAKGQPREPQVYTLPPSREEMTKNQVSLTCLVKGFYPSDIAVEWESNGQPENNYKTTPPVLDSDGSFFLYSKLTVDKSRWQQGNVFSCSVMHEALHNHYTQKSLSLSPGK

SEQ ID NO: 235 - protein, 991 aa, Artificial Sequence
  Synthetic peptide
QVQLVQSGAEVKKPGASVKVSCKASGYTFTNYYMHWVRQAPGLGLEWMGIINPSDGSTSYAQKFQGRVTMTRDTSTNTVYMDLSSLRSEDTAVYYCARGGNSAFYSYYDMDVWGQGTTVTVSSGGGGSGGGGSGGGGSDVVMTQTPLSLPVTLGQPASISCRSSQSLVYRDGNTYLSWFQQRPGQSPRRLIYKVSNWQSGVPDRFSGGGSGTDFTLKISRVEAEDVGVYYCMQGTHWPPTFGQGTKVEIKSGGGGSEVQLVESGGGLVQPGGSLKLSCAASGFTFNKYAMNWVRQAPGKGLEWVARIRSKYNNYATYYADSVKDRFTISRDDSKNTAYLQMNNLKTEDTAVYYCVRHGNFGNSYISYWAYWGQGTLVTVSSGGGGSGGGGSGGGGSQTVVTQEPSLTVSPGGTVTLTCGSSTGAVTSGNYPNWVQQKPGQAPRGLIGGTKFLAPGTPARFSGSLLGGKAALTLSGVQPEDEAEYYCVLWYSNRWVFGGGTKLTVLGGGGDKTHTCPPCPAPELLGGPSVFLFPPKPKDTLMISRTPEVTCVVVDVSHEDPEVKFNWYVDGVEVHNAKTKPCEEQYGSTYRCVSVLTVLHQDWLNGKEYKCKVSNKALPAPIEKTISKAKGQPREPQVYTLPPSREEMTKNQVSLTCLVKGFYPSDIAVEWESNGQPENNYKTTPPVLDSDGSFFLYSKLTVDKSRWQQGNVFSCSVMHEALHNHYTQKSLSLSPGGGGSGGGGSGGGGSGGGGSGGGGSGGGGSDKTHTCPPCPAPELLGGPSVFLFPPKPKDTLMISRTPEVTCVVVDVSHEDPEVKFNWYVDGVEVHNAKTKPCEEQYGSTYRCVSVLTVLHQDWLNGKEYKCKVSNKALPAPIEKTISKAKGQPREPQVYTLPPSREEMTKNQVSLTCLVKGFYPSDIAVEWESNGQPENNYKTTPPVLDSDGSFFLYSKLTVDKSRWQQGNVFSCSVMHEALHNHYTQKSLSLSPGK

SEQ ID NO: 236 - protein, 123 aa, Artificial Sequence
  Synthetic peptide
QVQLVQSGAEVKKPGASVKVSCKASGYTFTNYYMHWVRQAPGLCLEWMGIINPSDGSTSYAQKFQGRVTMTRDTSTNTVYMDLSSLRSEDTAVYYCARGGNSAFYSYYDMDVWGQGTTVTVSS

SEQ ID NO: 237 - protein, 112 aa, Artificial Sequence
  Synthetic peptide
DVVMTQTPLSLPVTLGQPASISCRSSQSLVYRDGNTYLSWFQQRPGQSPRRLIYKVSNWQSGVPDRFSGGGSGTDFTLKISRVEAEDVGVYYCMQGTHWPPTFGCGTKVEIK

SEQ ID NO: 238 - protein, 250 aa, Artificial Sequence
  Synthetic peptide
QVQLVQSGAEVKKPGASVKVSCKASGYTFTNYYMHWVRQAPGLCLEWMGIINPSDGSTSYAQKFQGRVTMTRDTSTNTVYMDLSSLRSEDTAVYYCARGGNSAFYSYYDMDVWGQGTTVTVSSGGGGSGGGGSGGGGSDVVMTQTPLSLPVTLGQPASISCRSSQSLVYRDGNTYLSWFQQRPGQSPRRLIYKVSNWQSGVPDRFSGGGSGTDFTLKISRVEAEDVGVYYCMQGTHWPPTFGCGTKVEIK

SEQ ID NO: 239 - protein, 505 aa, Artificial Sequence
  Synthetic peptide
QVQLVQSGAEVKKPGASVKVSCKASGYTFTNYYMHWVRQAPGLCLEWMGIINPSDGSTSYAQKFQGRVTMTRDTSTNTVYMDLSSLRSEDTAVYYCARGGNSAFYSYYDMDVWGQGTTVTVSSGGGGSGGGGSGGGGSDVVMTQTPLSLPVTLGQPASISCRSSQSLVYRDGNTYLSWFQQRPGQSPRRLIYKVSNWQSGVPDRFSGGGSGTDFTLKISRVEAEDVGVYYCMQGTHWPPTFGCGTKVEIKSGGGGSEVQLVESGGGLVQPGGSLKLSCAASGFTFNKYAMNWVRQAPGKGLEWVARIRSKYNNYATYYADSVKDRFTISRDDSKNTAYLQMNNLKTEDTAVYYCVRHGNFGNSYISYWAYWGQGTLVTVSSGGGGSGGGGSGGGGSQTVVTQEPSLTVSPGGTVTLTCGSSTGAVTSGNYPNWVQQKPGQAPRGLIGGTKFLAPGTPARFSGSLLGGKAALTLSGVQPEDEAEYYCVLWYSNRWVFGGGTKLTVL

SEQ ID NO: 240 - protein, 993 aa, Artificial Sequence
  Synthetic peptide
QVQLVQSGAEVKKPGASVKVSCKASGYTFTNYYMHWVRQAPGLCLEWMGIINPSDGSTSYAQKFQGRVTMTRDTSTNTVYMDLSSLRSEDTAVYYCARGGNSAFYSYYDMDVWGQGTTVTVSSGGGGSGGGGSGGGGSDVVMTQTPLSLPVTLGQPASISCRSSQSLVYRDGNTYLSWFQQRPGQSPRRLIYKVSNWQSGVPDRFSGGGSGTDFTLKISRVEAEDVGVYYCMQGTHWPPTFGCGTKVEIKSGGGGSEVQLVESGGGLVQPGGSLKLSCAASGFTFNKYAMNWVRQAPGKGLEWVARIRSKYNNYATYYADSVKDRFTISRDDSKNTAYLQMNNLKTEDTAVYYCVRHGNFGNSYISYWAYWGQGTLVTVSSGGGGSGGGGSGGGGSQTVVTQEPSLTVSPGGTVTLTCGSSTGAVTSGNYPNWVQQKPGQAPRGLIGGTKFLAPGTPARFSGSLLGGKAALTLSGVQPEDEAEYYCVLWYSNRWVFGGGTKLTVLGGGGDKTHTCPPCPAPELLGGPSVFLFPPKPKDTLMISRTPEVTCVVVDVSHEDPEVKFNWYVDGVEVHNAKTKPCEEQYGSTYRCVSVLTVLHQDWLNGKEYKCKVSNKALPAPIEKTISKAKGQPREPQVYTLPPSREEMTKNQVSLTCLVKGFYPSDIAVEWESNGQPENNYKTTPPVLDSDGSFFLYSKLTVDKSRWQQGNVFSCSVMHEALHNHYTQKSLSLSPGKGGGGSGGGGSGGGGSGGGGSGGGGSGGGGSDKTHTCPPCPAPELLGGPSVFLFPPKPKDTLMISRTPEVTCVVVDVSHEDPEVKFNWYVDGVEVHNAKTKPCEEQYGSTYRCVSVLTVLHQDWLNGKEYKCKVSNKALPAPIEKTISKAKGQPREPQVYTLPPSREEMTKNQVSLTCLVKGFYPSDIAVEWESNGQPENNYKTTPPVLDSDGSFFLYSKLTVDKSRWQQGNVFSCSVMHEALHNHYTQKSLSLSPGK

SEQ ID NO: 241 - protein, 991 aa, Artificial Sequence
  Synthetic peptide
QVQLVQSGAEVKKPGASVKVSCKASGYTFTNYYMHWVRQAPGLCLEWMGIINPSDGSTSYAQKFQGRVTMTRDTSTNTVYMDLSSLRSEDTAVYYCARGGNSAFYSYYDMDVWGQGTTVTVSSGGGGSGGGGSGGGGSDVVMTQTPLSLPVTLGQPASISCRSSQSLVYRDGNTYLSWFQQRPGQSPRRLIYKVSNWQSGVPDRFSGGGSGTDFTLKISRVEAEDVGVYYCMQGTHWPPTFGCGTKVEIKSGGGGSEVQLVESGGGLVQPGGSLKLSCAASGFTFNKYAMNWVRQAPGKGLEWVARIRSKYNNYATYYADSVKDRFTISRDDSKNTAYLQMNNLKTEDTAVYYCVRHGNFGNSYISYWAYWGQGTLVTVSSGGGGSGGGGSGGGGSQTVVTQEPSLTVSPGGTVTLTCGSSTGAVTSGNYPNWVQQKPGQAPRGLIGGTKFLAPGTPARFSGSLLGGKAALTLSGVQPEDEAEYYCVLWYSNRWVFGGGTKLTVLGGGGDKTHTCPPCPAPELLGGPSVFLFPPKPKDTLMISRTPEVTCVVVDVSHEDPEVKFNWYVDGVEVHNAKTKPCEEQYGSTYRCVSVLTVLHQDWLNGKEYKCKVSNKALPAPIEKTISKAKGQPREPQVYTLPPSREEMTKNQVSLTCLVKGFYPSDIAVEWESNGQPENNYKTTPPVLDSDGSFFLYSKLTVDKSRWQQGNVFSCSVMHEALHNHYTQKSLSLSPGGGGSGGGGSGGGGSGGGGSGGGGSGGGGSDKTHTCPPCPAPELLGGPSVFLFPPKPKDTLMISRTPEVTCVVVDVSHEDPEVKFNWYVDGVEVHNAKTKPCEEQYGSTYRCVSVLTVLHQDWLNGKEYKCKVSNKALPAPIEKTISKAKGQPREPQVYTLPPSREEMTKNQVSLTCLVKGFYPSDIAVEWESNGQPENNYKTTPPVLDSDGSFFLYSKLTVDKSRWQQGNVFSCSVMHEALHNHYTQKSLSLSPGK

SEQ ID NO: 242 - protein, 5 aa, Artificial Sequence
  Synthetic peptide
SYGVS

SEQ ID NO: 243 - protein, 17 aa, Artificial Sequence
  Synthetic peptide
YNDPVFGSIYYASWVKG

SEQ ID NO: 244 - protein, 14 aa, Artificial Sequence
  Synthetic peptide
DRSYVSSSGYHFNL

SEQ ID NO: 245 - protein, 11 aa, Artificial Sequence
  Synthetic peptide
QASETIYSSLA

SEQ ID NO: 246 - protein, 7 aa, Artificial Sequence
  Synthetic peptide
GASNLES

SEQ ID NO: 247 - protein, 10 aa, Artificial Sequence
  Synthetic peptide
QSGVYSAGLT

SEQ ID NO: 248 - protein, 123 aa, Artificial Sequence
  Synthetic peptide
EVQLLESGGGLVQPGGSLRLSCAASGFTFSSYGVSWVRQAPGKGLEWIGYNDPVFGSIYYASWVKGRFTISSDNSKNTLYLQMNSLRAEDTAVYYCAKDRSYVSSSGYHFNLWGQGTLVTVSS

SEQ ID NO: 249 - protein, 108 aa, Artificial Sequence
  Synthetic peptide
DIQMTQSPSSLSASVGDRVTITCQASETIYSSLAWYQQKPGKPPKLLIYGASNLESGVPSRFSGSGSGTDFTFTISSLQPEDIATYYCQSGVYSAGLTFGGGTKVEIK

SEQ ID NO: 250 - protein, 246 aa, Artificial Sequence
  Synthetic peptide
DIQMTQSPSSLSASVGDRVTITCQASETIYSSLAWYQQKPGKPPKLLIYGASNLESGVPSRFSGSGSGTDFTFTISSLQPEDIATYYCQSGVYSAGLTFGGGTKVEIKGGGGSGGGGSGGGGSEVQLLESGGGLVQPGGSLRLSCAASGFTFSSYGVSWVRQAPGKGLEWIGYNDPVFGSIYYASWVKGRFTISSDNSKNTLYLQMNSLRAEDTAVYYCAKDRSYVSSSGYHFNLWGQGTLVTVSS

SEQ ID NO: 251 - protein, 500 aa, Artificial Sequence
  Synthetic peptide
DIQMTQSPSSLSASVGDRVTITCQASETIYSSLAWYQQKPGKPPKLLIYGASNLESGVPSRFSGSGSGTDFTFTISSLQPEDIATYYCQSGVYSAGLTFGGGTKVEIKGGGGSGGGGSGGGGSEVQLLESGGGLVQPGGSLRLSCAASGFTFSSYGVSWVRQAPGKGLEWIGYNDPVFGSIYYASWVKGRFTISSDNSKNTLYLQMNSLRAEDTAVYYCAKDRSYVSSSGYHFNLWGQGTLVTVSSGGGGSEVQLVESGGGLVQPGGSLKLSCAASGFTFNKYAMNWVRQAPGKGLEWVARIRSKYNNYATYYADSVKDRFTISRDDSKNTAYLQMNNLKTEDTAVYYCVRHGNFGNSYISYWAYWGQGTLVTVSSGGGGSGGGGSGGGGSQTVVTQEPSLTVSPGGTVTLTCGSSTGAVTSGNYPNWVQQKPGQAPRGLIGGTKFLAPGTPARFSGSLLGGKAALTLSGVQPEDEAEYYCVLWYSNRWVFGGGTKLTVL

SEQ ID NO: 252 - protein, 988 aa, Artificial Sequence
  Synthetic peptide
DIQMTQSPSSLSASVGDRVTITCQASETIYSSLAWYQQKPGKPPKLLIYGASNLESGVPSRFSGSGSGTDFTFTISSLQPEDIATYYCQSGVYSAGLTFGGGTKVEIKGGGGSGGGGSGGGGSEVQLLESGGGLVQPGGSLRLSCAASGFTFSSYGVSWVRQAPGKGLEWIGYNDPVFGSIYYASWVKGRFTISSDNSKNTLYLQMNSLRAEDTAVYYCAKDRSYVSSSGYHFNLWGQGTLVTVSSGGGGSEVQLVESGGGLVQPGGSLKLSCAASGFTFNKYAMNWVRQAPGKGLEWVARIRSKYNNYATYYADSVKDRFTISRDDSKNTAYLQMNNLKTEDTAVYYCVRHGNFGNSYISYWAYWGQGTLVTVSSGGGGSGGGGSGGGGSQTVVTQEPSLTVSPGGTVTLTCGSSTGAVTSGNYPNWVQQKPGQAPRGLIGGTKFLAPGTPARFSGSLLGGKAALTLSGVQPEDEAEYYCVLWYSNRWVFGGGTKLTVLGGGGDKTHTCPPCPAPELLGGPSVFLFPPKPKDTLMISRTPEVTCVVVDVSHEDPEVKFNWYVDGVEVHNAKTKPCEEQYGSTYRCVSVLTVLHQDWLNGKEYKCKVSNKALPAPIEKTISKAKGQPREPQVYTLPPSREEMTKNQVSLTCLVKGFYPSDIAVEWESNGQPENNYKTTPPVLDSDGSFFLYSKLTVDKSRWQQGNVFSCSVMHEALHNHYTQKSLSLSPGKGGGGSGGGGSGGGGSGGGGSGGGGSGGGGSDKTHTCPPCPAPELLGGPSVFLFPPKPKDTLMISRTPEVTCVVVDVSHEDPEVKFNWYVDGVEVHNAKTKPCEEQYGSTYRCVSVLTVLHQDWLNGKEYKCKVSNKALPAPIEKTISKAKGQPREPQVYTLPPSREEMTKNQVSLTCLVKGFYPSDIAVEWESNGQPENNYKTTPPVLDSDGSFFLYSKLTVDKSRWQQGNVFSCSVMHEALHNHYTQKSLSLSPGK

SEQ ID NO: 253 - protein, 123 aa, Artificial Sequence
  Synthetic peptide
EVQLLESGGGLVQPGGSLRLSCAASGFTFSSYGVSWVRQAPGKCLEWIGYNDPVFGSIYYASWVKGRFTISSDNSKNTLYLQMNSLRAEDTAVYYCAKDRSYVSSSGYHFNLWGQGTLVTVSS

SEQ ID NO: 254 - protein, 108 aa, Artificial Sequence
  Synthetic peptide
DIQMTQSPSSLSASVGDRVTITCQASETIYSSLAWYQQKPGKPPKLLIYGASNLESGVPSRFSGSGSGTDFTFTISSLQPEDIATYYCQSGVYSAGLTFGCGTKVEIK

SEQ ID NO: 255 - protein, 246 aa, Artificial Sequence
  Synthetic peptide
DIQMTQSPSSLSASVGDRVTITCQASETIYSSLAWYQQKPGKPPKLLIYGASNLESGVPSRFSGSGSGTDFTFTISSLQPEDIATYYCQSGVYSAGLTFGCGTKVEIKGGGGSGGGGSGGGGSEVQLLESGGGLVQPGGSLRLSCAASGFTFSSYGVSWVRQAPGKCLEWIGYNDPVFGSIYYASWVKGRFTISSDNSKNTLYLQMNSLRAEDTAVYYCAKDRSYVSSSGYHFNLWGQGTLVTVSS

SEQ ID NO: 256 - protein, 500 aa, Artificial Sequence
  Synthetic peptide
DIQMTQSPSSLSASVGDRVTITCQASETIYSSLAWYQQKPGKPPKLLIYGASNLESGVPSRFSGSGSGTDFTFTISSLQPEDIATYYCQSGVYSAGLTFGCGTKVEIKGGGGSGGGGSGGGGSEVQLLESGGGLVQPGGSLRLSCAASGFTFSSYGVSWVRQAPGKCLEWIGYNDPVFGSIYYASWVKGRFTISSDNSKNTLYLQMNSLRAEDTAVYYCAKDRSYVSSSGYHFNLWGQGTLVTVSSGGGGSEVQLVESGGGLVQPGGSLKLSCAASGFTFNKYAMNWVRQAPGKGLEWVARIRSKYNNYATYYADSVKDRFTISRDDSKNTAYLQMNNLKTEDTAVYYCVRHGNFGNSYISYWAYWGQGTLVTVSSGGGGSGGGGSGGGGSQTVVTQEPSLTVSPGGTVTLTCGSSTGAVTSGNYPNWVQQKPGQAPRGLIGGTKFLAPGTPARFSGSLLGGKAALTLSGVQPEDEAEYYCVLWYSNRWVFGGGTKLTVL

SEQ ID NO: 257 - protein, 988 aa, Artificial Sequence
  Synthetic peptide
DIQMTQSPSSLSASVGDRVTITCQASETIYSSLAWYQQKPGKPPKLLIYGASNLESGVPSRFSGSGSGTDFTFTISSLQPEDIATYYCQSGVYSAGLTFGCGTKVEIKGGGGSGGGGSGGGGSEVQLLESGGGLVQPGGSLRLSCAASGFTFSSYGVSWVRQAPGKCLEWIGYNDPVFGSIYYASWVKGRFTISSDNSKNTLYLQMNSLRAEDTAVYYCAKDRSYVSSSGYHFNLWGQGTLVTVSSGGGGSEVQLVESGGGLVQPGGSLKLSCAASGFTFNKYAMNWVRQAPGKGLEWVARIRSKYNNYATYYADSVKDRFTISRDDSKNTAYLQMNNLKTEDTAVYYCVRHGNFGNSYISYWAYWGQGTLVTVSSGGGGSGGGGSGGGGSQTVVTQEPSLTVSPGGTVTLTCGSSTGAVTSGNYPNWVQQKPGQAPRGLIGGTKFLAPGTPARFSGSLLGGKAALTLSGVQPEDEAEYYCVLWYSNRWVFGGGTKLTVLGGGGDKTHTCPPCPAPELLGGPSVFLFPPKPKDTLMISRTPEVTCVVVDVSHEDPEVKFNWYVDGVEVHNAKTKPCEEQYGSTYRCVSVLTVLHQDWLNGKEYKCKVSNKALPAPIEKTISKAKGQPREPQVYTLPPSREEMTKNQVSLTCLVKGFYPSDIAVEWESNGQPENNYKTTPPVLDSDGSFFLYSKLTVDKSRWQQGNVFSCSVMHEALHNHYTQKSLSLSPGKGGGGSGGGGSGGGGSGGGGSGGGGSGGGGSDKTHTCPPCPAPELLGGPSVFLFPPKPKDTLMISRTPEVTCVVVDVSHEDPEVKFNWYVDGVEVHNAKTKPCEEQYGSTYRCVSVLTVLHQDWLNGKEYKCKVSNKALPAPIEKTISKAKGQPREPQVYTLPPSREEMTKNQVSLTCLVKGFYPSDIAVEWESNGQPENNYKTTPPVLDSDGSFFLYSKLTVDKSRWQQGNVFSCSVMHEALHNHYTQKSLSLSPGK

SEQ ID NO: 258 - protein, 5 aa, Artificial Sequence
  Synthetic peptide
SYGVS

SEQ ID NO: 259 - protein, 17 aa, Artificial Sequence
  Synthetic peptide
YNDPVFGSIYYASWVKG

SEQ ID NO: 260 - protein, 14 aa, Artificial Sequence
  Synthetic peptide
DRSYVSSSGYHFNL

SEQ ID NO: 261 - protein, 11 aa, Artificial Sequence
  Synthetic peptide
QASETIYSSLA

SEQ ID NO: 262 - protein, 7 aa, Artificial Sequence
  Synthetic peptide
GASNLES

SEQ ID NO: 263 - protein, 10 aa, Artificial Sequence
  Synthetic peptide
QSGVYSAGLT

SEQ ID NO: 264 - protein, 123 aa, Artificial Sequence; identical to SEQ ID NO: 248
  Synthetic peptide

SEQ ID NO: 265 - protein, 108 aa, Artificial Sequence
  Synthetic peptide
DIQMTQSPSSLSASVGDRVTITCQASETIYSSLAWYQQKPGKAPKLLIYGASNLESGVPSRFSGSGSGTDFTFTISSMQPEDIATYYCQSGVYSAGLTFGGGTKVEIK

SEQ ID NO: 266 - protein, 246 aa, Artificial Sequence
  Synthetic peptide
DIQMTQSPSSLSASVGDRVTITCQASETIYSSLAWYQQKPGKAPKLLIYGASNLESGVPSRFSGSGSGTDFTFTISSMQPEDIATYYCQSGVYSAGLTFGGGTKVEIKGGGGSGGGGSGGGGSEVQLLESGGGLVQPGGSLRLSCAASGFTFSSYGVSWVRQAPGKGLEWIGYNDPVFGSIYYASWVKGRFTISSDNSKNTLYLQMNSLRAEDTAVYYCAKDRSYVSSSGYHFNLWGQGTLVTVSS

SEQ ID NO: 267 - protein, 500 aa, Artificial Sequence
  Synthetic peptide
DIQMTQSPSSLSASVGDRVTITCQASETIYSSLAWYQQKPGKAPKLLIYGASNLESGVPSRFSGSGSGTDFTFTISSMQPEDIATYYCQSGVYSAGLTFGGGTKVEIKGGGGSGGGGSGGGGSEVQLLESGGGLVQPGGSLRLSCAASGFTFSSYGVSWVRQAPGKGLEWIGYNDPVFGSIYYASWVKGRFTISSDNSKNTLYLQMNSLRAEDTAVYYCAKDRSYVSSSGYHFNLWGQGTLVTVSSGGGGSEVQLVESGGGLVQPGGSLKLSCAASGFTFNKYAMNWVRQAPGKGLEWVARIRSKYNNYATYYADSVKDRFTISRDDSKNTAYLQMNNLKTEDTAVYYCVRHGNFGNSYISYWAYWGQGTLVTVSSGGGGSGGGGSGGGGSQTVVTQEPSLTVSPGGTVTLTCGSSTGAVTSGNYPNWVQQKPGQAPRGLIGGTKFLAPGTPARFSGSLLGGKAALTLSGVQPEDEAEYYCVLWYSNRWVFGGGTKLTVL

SEQ ID NO: 268 - protein, 988 aa, Artificial Sequence
  Synthetic peptide
DIQMTQSPSSLSASVGDRVTITCQASETIYSSLAWYQQKPGKAPKLLIYGASNLESGVPSRFSGSGSGTDFTFTISSMQPEDIATYYCQSGVYSAGLTFGGGTKVEIKGGGGSGGGGSGGGGSEVQLLESGGGLVQPGGSLRLSCAASGFTFSSYGVSWVRQAPGKGLEWIGYNDPVFGSIYYASWVKGRFTISSDNSKNTLYLQMNSLRAEDTAVYYCAKDRSYVSSSGYHFNLWGQGTLVTVSSGGGGSEVQLVESGGGLVQPGGSLKLSCAASGFTFNKYAMNWVRQAPGKGLEWVARIRSKYNNYATYYADSVKDRFTISRDDSKNTAYLQMNNLKTEDTAVYYCVRHGNFGNSYISYWAYWGQGTLVTVSSGGGGSGGGGSGGGGSQTVVTQEPSLTVSPGGTVTLTCGSSTGAVTSGNYPNWVQQKPGQAPRGLIGGTKFLAPGTPARFSGSLLGGKAALTLSGVQPEDEAEYYCVLWYSNRWVFGGGTKLTVLGGGGDKTHTCPPCPAPELLGGPSVFLFPPKPKDTLMISRTPEVTCVVVDVSHEDPEVKFNWYVDGVEVHNAKTKPCEEQYGSTYRCVSVLTVLHQDWLNGKEYKCKVSNKALPAPIEKTISKAKGQPREPQVYTLPPSREEMTKNQVSLTCLVKGFYPSDIAVEWESNGQPENNYKTTPPVLDSDGSFFLYSKLTVDKSRWQQGNVFSCSVMHEALHNHYTQKSLSLSPGKGGGGSGGGGSGGGGSGGGGSGGGGSGGGGSDKTHTCPPCPAPELLGGPSVFLFPPKPKDTLMISRTPEVTCVVVDVSHEDPEVKFNWYVDGVEVHNAKTKPCEEQYGSTYRCVSVLTVLHQDWLNGKEYKCKVSNKALPAPIEKTISKAKGQPREPQVYTLPPSREEMTKNQVSLTCLVKGFYPSDIAVEWESNGQPENNYKTTPPVLDSDGSFFLYSKLTVDKSRWQQGNVFSCSVMHEALHNHYTQKSLSLSPGK

SEQ ID NO: 269 - protein, 123 aa, Artificial Sequence; identical to SEQ ID NO: 253
  Synthetic peptide

SEQ ID NO: 270 - protein, 108 aa, Artificial Sequence
  Synthetic peptide
DIQMTQSPSSLSASVGDRVTITCQASETIYSSLAWYQQKPGKAPKLLIYGASNLESGVPSRFSGSGSGTDFTFTISSMQPEDIATYYCQSGVYSAGLTFGCGTKVEIK

SEQ ID NO: 271 - protein, 246 aa, Artificial Sequence
  Synthetic peptide
DIQMTQSPSSLSASVGDRVTITCQASETIYSSLAWYQQKPGKAPKLLIYGASNLESGVPSRFSGSGSGTDFTFTISSMQPEDIATYYCQSGVYSAGLTFGCGTKVEIKGGGGSGGGGSGGGGSEVQLLESGGGLVQPGGSLRLSCAASGFTFSSYGVSWVRQAPGKCLEWIGYNDPVFGSIYYASWVKGRFTISSDNSKNTLYLQMNSLRAEDTAVYYCAKDRSYVSSSGYHFNLWGQGTLVTVSS

SEQ ID NO: 272 - protein, 500 aa, Artificial Sequence
  Synthetic peptide
DIQMTQSPSSLSASVGDRVTITCQASETIYSSLAWYQQKPGKAPKLLIYGASNLESGVPSRFSGSGSGTDFTFTISSMQPEDIATYYCQSGVYSAGLTFGCGTKVEIKGGGGSGGGGSGGGGSEVQLLESGGGLVQPGGSLRLSCAASGFTFSSYGVSWVRQAPGKCLEWIGYNDPVFGSIYYASWVKGRFTISSDNSKNTLYLQMNSLRAEDTAVYYCAKDRSYVSSSGYHFNLWGQGTLVTVSSGGGGSEVQLVESGGGLVQPGGSLKLSCAASGFTFNKYAMNWVRQAPGKGLEWVARIRSKYNNYATYYADSVKDRFTISRDDSKNTAYLQMNNLKTEDTAVYYCVRHGNFGNSYISYWAYWGQGTLVTVSSGGGGSGGGGSGGGGSQTVVTQEPSLTVSPGGTVTLTCGSSTGAVTSGNYPNWVQQKPGQAPRGLIGGTKFLAPGTPARFSGSLLGGKAALTLSGVQPEDEAEYYCVLWYSNRWVFGGGTKLTVL

SEQ ID NO: 273 - protein, 988 aa, Artificial Sequence
  Synthetic peptide
DIQMTQSPSSLSASVGDRVTITCQASETIYSSLAWYQQKPGKAPKLLIYGASNLESGVPSRFSGSGSGTDFTFTISSMQPEDIATYYCQSGVYSAGLTFGCGTKVEIKGGGGSGGGGSGGGGSEVQLLESGGGLVQPGGSLRLSCAASGFTFSSYGVSWVRQAPGKCLEWIGYNDPVFGSIYYASWVKGRFTISSDNSKNTLYLQMNSLRAEDTAVYYCAKDRSYVSSSGYHFNLWGQGTLVTVSSGGGGSEVQLVESGGGLVQPGGSLKLSCAASGFTFNKYAMNWVRQAPGKGLEWVARIRSKYNNYATYYADSVKDRFTISRDDSKNTAYLQMNNLKTEDTAVYYCVRHGNFGNSYISYWAYWGQGTLVTVSSGGGGSGGGGSGGGGSQTVVTQEPSLTVSPGGTVTLTCGSSTGAVTSGNYPNWVQQKPGQAPRGLIGGTKFLAPGTPARFSGSLLGGKAALTLSGVQPEDEAEYYCVLWYSNRWVFGGGTKLTVLGGGGDKTHTCPPCPAPELLGGPSVFLFPPKPKDTLMISRTPEVTCVVVDVSHEDPEVKFNWYVDGVEVHNAKTKPCEEQYGSTYRCVSVLTVLHQDWLNGKEYKCKVSNKALPAPIEKTISKAKGQPREPQVYTLPPSREEMTKNQVSLTCLVKGFYPSDIAVEWESNGQPENNYKTTPPVLDSDGSFFLYSKLTVDKSRWQQGNVFSCSVMHEALHNHYTQKSLSLSPGKGGGGSGGGGSGGGGSGGGGSGGGGSGGGGSDKTHTCPPCPAPELLGGPSVFLFPPKPKDTLMISRTPEVTCVVVDVSHEDPEVKFNWYVDGVEVHNAKTKPCEEQYGSTYRCVSVLTVLHQDWLNGKEYKCKVSNKALPAPIEKTISKAKGQPREPQVYTLPPSREEMTKNQVSLTCLVKGFYPSDIAVEWESNGQPENNYKTTPPVLDSDGSFFLYSKLTVDKSRWQQGNVFSCSVMHEALHNHYTQKSLSLSPGK

SEQ ID NO: 274 - protein, 5 aa, Artificial Sequence
  Synthetic peptide
SYGVS

SEQ ID NO: 275 - protein, 17 aa, Artificial Sequence
  Synthetic peptide
YNDPVFGSIYYASWVKG

SEQ ID NO: 276 - protein, 14 aa, Artificial Sequence
  Synthetic peptide
DRSYVSSSGYHFNL

SEQ ID NO: 277 - protein, 11 aa, Artificial Sequence
  Synthetic peptide
QASETIYSSLA

SEQ ID NO: 278 - protein, 7 aa, Artificial Sequence
  Synthetic peptide
GASNLES

SEQ ID NO: 279 - protein, 10 aa, Artificial Sequence
  Synthetic peptide
QSGVYSAGLT

SEQ ID NO: 280 - protein, 123 aa, Artificial Sequence; identical to SEQ ID NO: 248
  Synthetic peptide

SEQ ID NO: 281 - protein, 108 aa, Artificial Sequence
  Synthetic peptide
DIQMTQSPSSLSASVGDRVTITCQASETIYSSLAWYQQKPGKAPKLLIYGASNLESGVPSRFSGSGSGTDFTFTISGLQPEDIATYYCQSGVYSAGLTFGGGTKVEIK

SEQ ID NO: 282 - protein, 246 aa, Artificial Sequence
  Synthetic peptide
DIQMTQSPSSLSASVGDRVTITCQASETIYSSLAWYQQKPGKAPKLLIYGASNLESGVPSRFSGSGSGTDFTFTISGLQPEDIATYYCQSGVYSAGLTFGGGTKVEIKGGGGSGGGGSGGGGSEVQLLESGGGLVQPGGSLRLSCAASGFTFSSYGVSWVRQAPGKGLEWIGYNDPVFGSIYYASWVKGRFTISSDNSKNTLYLQMNSLRAEDTAVYYCAKDRSYVSSSGYHFNLWGQGTLVTVSS

SEQ ID NO: 283 - protein, 500 aa, Artificial Sequence
  Synthetic peptide
DIQMTQSPSSLSASVGDRVTITCQASETIYSSLAWYQQKPGKAPKLLIYGASNLESGVPSRFSGSGSGTDFTFTISGLQPEDIATYYCQSGVYSAGLTFGGGTKVEIKGGGGSGGGGSGGGGSEVQLLESGGGLVQPGGSLRLSCAASGFTFSSYGVSWVRQAPGKGLEWIGYNDPVFGSIYYASWVKGRFTISSDNSKNTLYLQMNSLRAEDTAVYYCAKDRSYVSSSGYHFNLWGQGTLVTVSSGGGGSEVQLVESGGGLVQPGGSLKLSCAASGFTFNKYAMNWVRQAPGKGLEWVARIRSKYNNYATYYADSVKDRFTISRDDSKNTAYLQMNNLKTEDTAVYYCVRHGNFGNSYISYWAYWGQGTLVTVSSGGGGSGGGGSGGGGSQTVVTQEPSLTVSPGGTVTLTCGSSTGAVTSGNYPNWVQQKPGQAPRGLIGGTKFLAPGTPARFSGSLLGGKAALTLSGVQPEDEAEYYCVLWYSNRWVFGGGTKLTVL

SEQ ID NO: 284 - protein, 988 aa, Artificial Sequence
  Synthetic peptide
DIQMTQSPSSLSASVGDRVTITCQASETIYSSLAWYQQKPGKAPKLLIYGASNLESGVPSRFSGSGSGTDFTFTISGLQPEDIATYYCQSGVYSAGLTFGGGTKVEIKGGGGSGGGGSGGGGSEVQLLESGGGLVQPGGSLRLSCAASGFTFSSYGVSWVRQAPGKGLEWIGYNDPVFGSIYYASWVKGRFTISSDNSKNTLYLQMNSLRAEDTAVYYCAKDRSYVSSSGYHFNLWGQGTLVTVSSGGGGSEVQLVESGGGLVQPGGSLKLSCAASGFTFNKYAMNWVRQAPGKGLEWVARIRSKYNNYATYYADSVKDRFTISRDDSKNTAYLQMNNLKTEDTAVYYCVRHGNFGNSYISYWAYWGQGTLVTVSSGGGGSGGGGSGGGGSQTVVTQEPSLTVSPGGTVTLTCGSSTGAVTSGNYPNWVQQKPGQAPRGLIGGTKFLAPGTPARFSGSLLGGKAALTLSGVQPEDEAEYYCVLWYSNRWVFGGGTKLTVLGGGGDKTHTCPPCPAPELLGGPSVFLFPPKPKDTLMISRTPEVTCVVVDVSHEDPEVKFNWYVDGVEVHNAKTKPCEEQYGSTYRCVSVLTVLHQDWLNGKEYKCKVSNKALPAPIEKTISKAKGQPREPQVYTLPPSREEMTKNQVSLTCLVKGFYPSDIAVEWESNGQPENNYKTTPPVLDSDGSFFLYSKLTVDKSRWQQGNVFSCSVMHEALHNHYTQKSLSLSPGKGGGGSGGGGSGGGGSGGGGSGGGGSGGGGSDKTHTCPPCPAPELLGGPSVFLFPPKPKDTLMISRTPEVTCVVVDVSHEDPEVKFNWYVDGVEVHNAKTKPCEEQYGSTYRCVSVLTVLHQDWLNGKEYKCKVSNKALPAPIEKTISKAKGQPREPQVYTLPPSREEMTKNQVSLTCLVKGFYPSDIAVEWESNGQPENNYKTTPPVLDSDGSFFLYSKLTVDKSRWQQGNVFSCSVMHEALHNHYTQKSLSLSPGK

SEQ ID NO: 285 - protein, 123 aa, Artificial Sequence; identical to SEQ ID NO: 253
  Synthetic peptide

SEQ ID NO: 286 - protein, 108 aa, Artificial Sequence
  Synthetic peptide
DIQMTQSPSSLSASVGDRVTITCQASETIYSSLAWYQQKPGKAPKLLIYGASNLESGVPSRFSGSGSGTDFTFTISGLQPEDIATYYCQSGVYSAGLTFGCGTKVEIK

SEQ ID NO: 287 - protein, 246 aa, Artificial Sequence
  Synthetic peptide
DIQMTQSPSSLSASVGDRVTITCQASETIYSSLAWYQQKPGKAPKLLIYGASNLESGVPSRFSGSGSGTDFTFTISGLQPEDIATYYCQSGVYSAGLTFGCGTKVEIKGGGGSGGGGSGGGGSEVQLLESGGGLVQPGGSLRLSCAASGFTFSSYGVSWVRQAPGKCLEWIGYNDPVFGSIYYASWVKGRFTISSDNSKNTLYLQMNSLRAEDTAVYYCAKDRSYVSSSGYHFNLWGQGTLVTVSS

SEQ ID NO: 288 - protein, 500 aa, Artificial Sequence
  Synthetic peptide
DIQMTQSPSSLSASVGDRVTITCQASETIYSSLAWYQQKPGKAPKLLIYGASNLESGVPSRFSGSGSGTDFTFTISGLQPEDIATYYCQSGVYSAGLTFGCGTKVEIKGGGGSGGGGSGGGGSEVQLLESGGGLVQPGGSLRLSCAASGFTFSSYGVSWVRQAPGKCLEWIGYNDPVFGSIYYASWVKGRFTISSDNSKNTLYLQMNSLRAEDTAVYYCAKDRSYVSSSGYHFNLWGQGTLVTVSSGGGGSEVQLVESGGGLVQPGGSLKLSCAASGFTFNKYAMNWVRQAPGKGLEWVARIRSKYNNYATYYADSVKDRFTISRDDSKNTAYLQMNNLKTEDTAVYYCVRHGNFGNSYISYWAYWGQGTLVTVSSGGGGSGGGGSGGGGSQTVVTQEPSLTVSPGGTVTLTCGSSTGAVTSGNYPNWVQQKPGQAPRGLIGGTKFLAPGTPARFSGSLLGGKAALTLSGVQPEDEAEYYCVLWYSNRWVFGGGTKLTVL

SEQ ID NO: 289 - protein, 988 aa, Artificial Sequence
  Synthetic peptide
DIQMTQSPSSLSASVGDRVTITCQASETIYSSLAWYQQKPGKAPKLLIYGASNLESGVPSRFSGSGSGTDFTFTISGLQPEDIATYYCQSGVYSAGLTFGCGTKVEIKGGGGSGGGGSGGGGSEVQLLESGGGLVQPGGSLRLSCAASGFTFSSYGVSWVRQAPGKCLEWIGYNDPVFGSIYYASWVKGRFTISSDNSKNTLYLQMNSLRAEDTAVYYCAKDRSYVSSSGYHFNLWGQGTLVTVSSGGGGSEVQLVESGGGLVQPGGSLKLSCAASGFTFNKYAMNWVRQAPGKGLEWVARIRSKYNNYATYYADSVKDRFTISRDDSKNTAYLQMNNLKTEDTAVYYCVRHGNFGNSYISYWAYWGQGTLVTVSSGGGGSGGGGSGGGGSQTVVTQEPSLTVSPGGTVTLTCGSSTGAVTSGNYPNWVQQKPGQAPRGLIGGTKFLAPGTPARFSGSLLGGKAALTLSGVQPEDEAEYYCVLWYSNRWVFGGGTKLTVLGGGGDKTHTCPPCPAPELLGGPSVFLFPPKPKDTLMISRTPEVTCVVVDVSHEDPEVKFNWYVDGVEVHNAKTKPCEEQYGSTYRCVSVLTVLHQDWLNGKEYKCKVSNKALPAPIEKTISKAKGQPREPQVYTLPPSREEMTKNQVSLTCLVKGFYPSDIAVEWESNGQPENNYKTTPPVLDSDGSFFLYSKLTVDKSRWQQGNVFSCSVMHEALHNHYTQKSLSLSPGKGGGGSGGGGSGGGGSGGGGSGGGGSGGGGSDKTHTCPPCPAPELLGGPSVFLFPPKPKDTLMISRTPEVTCVVVDVSHEDPEVKFNWYVDGVEVHNAKTKPCEEQYGSTYRCVSVLTVLHQDWLNGKEYKCKVSNKALPAPIEKTISKAKGQPREPQVYTLPPSREEMTKNQVSLTCLVKGFYPSDIAVEWESNGQPENNYKTTPPVLDSDGSFFLYSKLTVDKSRWQQGNVFSCSVMHEALHNHYTQKSLSLSPGK

SEQ ID NO: 290 - protein, 5 aa, Artificial Sequence
  Synthetic peptide
SYGVS

SEQ ID NO: 291 - protein, 17 aa, Artificial Sequence
  Synthetic peptide
YNDPVFGSIYYASWVKG

SEQ ID NO: 292 - protein, 14 aa, Artificial Sequence
  Synthetic peptide
DRSYVSSSGYHFNL

SEQ ID NO: 293 - protein, 11 aa, Artificial Sequence
  Synthetic peptide
QASETIYSSLA

SEQ ID NO: 294 - protein, 7 aa, Artificial Sequence
  Synthetic peptide
GASNLES

SEQ ID NO: 295 - protein, 10 aa, Artificial Sequence
  Synthetic peptide
QSGVYSAGLT

SEQ ID NO: 296 - protein, 123 aa, Artificial Sequence
  Synthetic peptide
EVQLLESGGGLVQPGGSLRLSCAASGFTFSSYGVSWVRQAPGKGLEWVGYNDPVFGSIYYASWVKGRFTISSDNSKNTLYLQMNSLRAEDTAVYYCAKDRSYVSSSGYHFNLWGQGTLVTVSS

SEQ ID NO: 297 - protein, 108 aa, Artificial Sequence
  Synthetic peptide
DIQMTQSPSSLSASVGDRVTITCQASETIYSSLAWYQQKPGKAPKLLIYGASNLESGVPSRFSGSGSGTDFTFTISSLQPEDIATYYCQSGVYSAGLTFGGGTKVEIK

SEQ ID NO: 298 - protein, 246 aa, Artificial Sequence
  Synthetic peptide
DIQMTQSPSSLSASVGDRVTITCQASETIYSSLAWYQQKPGKAPKLLIYGASNLESGVPSRFSGSGSGTDFTFTISSLQPEDIATYYCQSGVYSAGLTFGGGTKVEIKGGGGSGGGGSGGGGSEVQLLESGGGLVQPGGSLRLSCAASGFTFSSYGVSWVRQAPGKGLEWVGYNDPVFGSIYYASWVKGRFTISSDNSKNTLYLQMNSLRAEDTAVYYCAKDRSYVSSSGYHFNLWGQGTLVTVSS

SEQ ID NO: 299 - protein, 500 aa, Artificial Sequence
  Synthetic peptide
DIQMTQSPSSLSASVGDRVTITCQASETIYSSLAWYQQKPGKAPKLLIYGASNLESGVPSRFSGSGSGTDFTFTISSLQPEDIATYYCQSGVYSAGLTFGGGTKVEIKGGGGSGGGGSGGGGSEVQLLESGGGLVQPGGSLRLSCAASGFTFSSYGVSWVRQAPGKGLEWVGYNDPVFGSIYYASWVKGRFTISSDNSKNTLYLQMNSLRAEDTAVYYCAKDRSYVSSSGYHFNLWGQGTLVTVSSGGGGSEVQLVESGGGLVQPGGSLKLSCAASGFTFNKYAMNWVRQAPGKGLEWVARIRSKYNNYATYYADSVKDRFTISRDDSKNTAYLQMNNLKTEDTAVYYCVRHGNFGNSYISYWAYWGQGTLVTVSSGGGGSGGGGSGGGGSQTVVTQEPSLTVSPGGTVTLTCGSSTGAVTSGNYPNWVQQKPGQAPRGLIGGTKFLAPGTPARFSGSLLGGKAALTLSGVQPEDEAEYYCVLWYSNRWVFGGGTKLTVL

SEQ ID NO: 300 - protein, 988 aa, Artificial Sequence
  Synthetic peptide
DIQMTQSPSSLSASVGDRVTITCQASETIYSSLAWYQQKPGKAPKLLIYGASNLESGVPSRFSGSGSGTDFTFTISSLQPEDIATYYCQSGVYSAGLTFGGGTKVEIKGGGGSGGGGSGGGGSEVQLLESGGGLVQPGGSLRLSCAASGFTFSSYGVSWVRQAPGKGLEWVGYNDPVFGSIYYASWVKGRFTISSDNSKNTLYLQMNSLRAEDTAVYYCAKDRSYVSSSGYHFNLWGQGTLVTVSSGGGGSEVQLVESGGGLVQPGGSLKLSCAASGFTFNKYAMNWVRQAPGKGLEWVARIRSKYNNYATYYADSVKDRFTISRDDSKNTAYLQMNNLKTEDTAVYYCVRHGNFGNSYISYWAYWGQGTLVTVSSGGGGSGGGGSGGGGSQTVVTQEPSLTVSPGGTVTLTCGSSTGAVTSGNYPNWVQQKPGQAPRGLIGGTKFLAPGTPARFSGSLLGGKAALTLSGVQPEDEAEYYCVLWYSNRWVFGGGTKLTVLGGGGDKTHTCPPCPAPELLGGPSVFLFPPKPKDTLMISRTPEVTCVVVDVSHEDPEVKFNWYVDGVEVHNAKTKPCEEQYGSTYRCVSVLTVLHQDWLNGKEYKCKVSNKALPAPIEKTISKAKGQPREPQVYTLPPSREEMTKNQVSLTCLVKGFYPSDIAVEWESNGQPENNYKTTPPVLDSDGSFFLYSKLTVDKSRWQQGNVFSCSVMHEALHNHYTQKSLSLSPGKGGGGSGGGGSGGGGSGGGGSGGGGSGGGGSDKTHTCPPCPAPELLGGPSVFLFPPKPKDTLMISRTPEVTCVVVDVSHEDPEVKFNWYVDGVEVHNAKTKPCEEQYGSTYRCVSVLTVLHQDWLNGKEYKCKVSNKALPAPIEKTISKAKGQPREPQVYTLPPSREEMTKNQVSLTCLVKGFYPSDIAVEWESNGQPENNYKTTPPVLDSDGSFFLYSKLTVDKSRWQQGNVFSCSVMHEALHNHYTQKSLSLSPGK

SEQ ID NO: 301 - protein, 123 aa, Artificial Sequence
  Synthetic peptide
EVQLLESGGGLVQPGGSLRLSCAASGFTFSSYGVSWVRQAPGKCLEWVGYNDPVFGSIYYASWVKGRFTISSDNSKNTLYLQMNSLRAEDTAVYYCAKDRSYVSSSGYHFNLWGQGTLVTVSS

SEQ ID NO: 302 - protein, 108 aa, Artificial Sequence
  Synthetic peptide
DIQMTQSPSSLSASVGDRVTITCQASETIYSSLAWYQQKPGKAPKLLIYGASNLESGVPSRFSGSGSGTDFTFTISSLQPEDIATYYCQSGVYSAGLTFGCGTKVEIK

SEQ ID NO: 303 - protein, 246 aa, Artificial Sequence
  Synthetic peptide
DIQMTQSPSSLSASVGDRVTITCQASETIYSSLAWYQQKPGKAPKLLIYGASNLESGVPSRFSGSGSGTDFTFTISSLQPEDIATYYCQSGVYSAGLTFGCGTKVEIKGGGGSGGGGSGGGGSEVQLLESGGGLVQPGGSLRLSCAASGFTFSSYGVSWVRQAPGKCLEWVGYNDPVFGSIYYASWVKGRFTISSDNSKNTLYLQMNSLRAEDTAVYYCAKDRSYVSSSGYHFNLWGQGTLVTVSS

SEQ ID NO: 304 - protein, 500 aa, Artificial Sequence
  Synthetic peptide
DIQMTQSPSSLSASVGDRVTITCQASETIYSSLAWYQQKPGKAPKLLIYGASNLESGVPSRFSGSGSGTDFTFTISSLQPEDIATYYCQSGVYSAGLTFGCGTKVEIKGGGGSGGGGSGGGGSEVQLLESGGGLVQPGGSLRLSCAASGFTFSSYGVSWVRQAPGKCLEWVGYNDPVFGSIYYASWVKGRFTISSDNSKNTLYLQMNSLRAEDTAVYYCAKDRSYVSSSGYHFNLWGQGTLVTVSSGGGGSEVQLVESGGGLVQPGGSLKLSCAASGFTFNKYAMNWVRQAPGKGLEWVARIRSKYNNYATYYADSVKDRFTISRDDSKNTAYLQMNNLKTEDTAVYYCVRHGNFGNSYISYWAYWGQGTLVTVSSGGGGSGGGGSGGGGSQTVVTQEPSLTVSPGGTVTLTCGSSTGAVTSGNYPNWVQQKPGQAPRGLIGGTKFLAPGTPARFSGSLLGGKAALTLSGVQPEDEAEYYCVLWYSNRWVFGGGTKLTVL

SEQ ID NO: 305 - protein, 988 aa, Artificial Sequence
  Synthetic peptide
DIQMTQSPSSLSASVGDRVTITCQASETIYSSLAWYQQKPGKAPKLLIYGASNLESGVPSRFSGSGSGTDFTFTISSLQPEDIATYYCQSGVYSAGLTFGCGTKVEIKGGGGSGGGGSGGGGSEVQLLESGGGLVQPGGSLRLSCAASGFTFSSYGVSWVRQAPGKCLEWVGYNDPVFGSIYYASWVKGRFTISSDNSKNTLYLQMNSLRAEDTAVYYCAKDRSYVSSSGYHFNLWGQGTLVTVSSGGGGSEVQLVESGGGLVQPGGSLKLSCAASGFTFNKYAMNWVRQAPGKGLEWVARIRSKYNNYATYYADSVKDRFTISRDDSKNTAYLQMNNLKTEDTAVYYCVRHGNFGNSYISYWAYWGQGTLVTVSSGGGGSGGGGSGGGGSQTVVTQEPSLTVSPGGTVTLTCGSSTGAVTSGNYPNWVQQKPGQAPRGLIGGTKFLAPGTPARFSGSLLGGKAALTLSGVQPEDEAEYYCVLWYSNRWVFGGGTKLTVLGGGGDKTHTCPPCPAPELLGGPSVFLFPPKPKDTLMISRTPEVTCVVVDVSHEDPEVKFNWYVDGVEVHNAKTKPCEEQYGSTYRCVSVLTVLHQDWLNGKEYKCKVSNKALPAPIEKTISKAKGQPREPQVYTLPPSREEMTKNQVSLTCLVKGFYPSDIAVEWESNGQPENNYKTTPPVLDSDGSFFLYSKLTVDKSRWQQGNVFSCSVMHEALHNHYTQKSLSLSPGKGGGGSGGGGSGGGGSGGGGSGGGGSGGGGSDKTHTCPPCPAPELLGGPSVFLFPPKPKDTLMISRTPEVTCVVVDVSHEDPEVKFNWYVDGVEVHNAKTKPCEEQYGSTYRCVSVLTVLHQDWLNGKEYKCKVSNKALPAPIEKTISKAKGQPREPQVYTLPPSREEMTKNQVSLTCLVKGFYPSDIAVEWESNGQPENNYKTTPPVLDSDGSFFLYSKLTVDKSRWQQGNVFSCSVMHEALHNHYTQKSLSLSPGK

SEQ ID NO: 306 - protein, 986 aa, Artificial Sequence
  Synthetic peptide
DIQMTQSPSSLSASVGDRVTITCQASETIYSSLAWYQQKPGKPPKLLIYGASNLESGVPSRFSGSGSGTDFTFTISSLQPEDIATYYCQSGVYSAGLTFGGGTKVEIKGGGGSGGGGSGGGGSEVQLLESGGGLVQPGGSLRLSCAASGFTFSSYGVSWVRQAPGKGLEWIGYNDPVFGSIYYASWVKGRFTISSDNSKNTLYLQMNSLRAEDTAVYYCAKDRSYVSSSGYHFNLWGQGTLVTVSSGGGGSEVQLVESGGGLVQPGGSLKLSCAASGFTFNKYAMNWVRQAPGKGLEWVARIRSKYNNYATYYADSVKDRFTISRDDSKNTAYLQMNNLKTEDTAVYYCVRHGNFGNSYISYWAYWGQGTLVTVSSGGGGSGGGGSGGGGSQTVVTQEPSLTVSPGGTVTLTCGSSTGAVTSGNYPNWVQQKPGQAPRGLIGGTKFLAPGTPARFSGSLLGGKAALTLSGVQPEDEAEYYCVLWYSNRWVFGGGTKLTVLGGGGDKTHTCPPCPAPELLGGPSVFLFPPKPKDTLMISRTPEVTCVVVDVSHEDPEVKFNWYVDGVEVHNAKTKPCEEQYGSTYRCVSVLTVLHQDWLNGKEYKCKVSNKALPAPIEKTISKAKGQPREPQVYTLPPSREEMTKNQVSLTCLVKGFYPSDIAVEWESNGQPENNYKTTPPVLDSDGSFFLYSKLTVDKSRWQQGNVFSCSVMHEALHNHYTQKSLSLSPGGGGSGGGGSGGGGSGGGGSGGGGSGGGGSDKTHTCPPCPAPELLGGPSVFLFPPKPKDTLMISRTPEVTCVVVDVSHEDPEVKFNWYVDGVEVHNAKTKPCEEQYGSTYRCVSVLTVLHQDWLNGKEYKCKVSNKALPAPIEKTISKAKGQPREPQVYTLPPSREEMTKNQVSLTCLVKGFYPSDIAVEWESNGQPENNYKTTPPVLDSDGSFFLYSKLTVDKSRWQQGNVFSCSVMHEALHNHYTQKSLSLSPGK

SEQ ID NO: 307 - protein, 986 aa, Artificial Sequence
  Synthetic peptide
DIQMTQSPSSLSASVGDRVTITCQASETIYSSLAWYQQKPGKPPKLLIYGASNLESGVPSRFSGSGSGTDFTFTISSLQPEDIATYYCQSGVYSAGLTFGCGTKVEIKGGGGSGGGGSGGGGSEVQLLESGGGLVQPGGSLRLSCAASGFTFSSYGVSWVRQAPGKCLEWIGYNDPVFGSIYYASWVKGRFTISSDNSKNTLYLQMNSLRAEDTAVYYCAKDRSYVSSSGYHFNLWGQGTLVTVSSGGGGSEVQLVESGGGLVQPGGSLKLSCAASGFTFNKYAMNWVRQAPGKGLEWVARIRSKYNNYATYYADSVKDRFTISRDDSKNTAYLQMNNLKTEDTAVYYCVRHGNFGNSYISYWAYWGQGTLVTVSSGGGGSGGGGSGGGGSQTVVTQEPSLTVSPGGTVTLTCGSSTGAVTSGNYPNWVQQKPGQAPRGLIGGTKFLAPGTPARFSGSLLGGKAALTLSGVQPEDEAEYYCVLWYSNRWVFGGGTKLTVLGGGGDKTHTCPPCPAPELLGGPSVFLFPPKPKDTLMISRTPEVTCVVVDVSHEDPEVKFNWYVDGVEVHNAKTKPCEEQYGSTYRCVSVLTVLHQDWLNGKEYKCKVSNKALPAPIEKTISKAKGQPREPQVYTLPPSREEMTKNQVSLTCLVKGFYPSDIAVEWESNGQPENNYKTTPPVLDSDGSFFLYSKLTVDKSRWQQGNVFSCSVMHEALHNHYTQKSLSLSPGGGGSGGGGSGGGGSGGGGSGGGGSGGGGSDKTHTCPPCPAPELLGGPSVFLFPPKPKDTLMISRTPEVTCVVVDVSHEDPEVKFNWYVDGVEVHNAKTKPCEEQYGSTYRCVSVLTVLHQDWLNGKEYKCKVSNKALPAPIEKTISKAKGQPREPQVYTLPPSREEMTKNQVSLTCLVKGFYPSDIAVEWESNGQPENNYKTTPPVLDSDGSFFLYSKLTVDKSRWQQGNVFSCSVMHEALHNHYTQKSLSLSPGK

SEQ ID NO: 308 - protein, 986 aa, Artificial Sequence
  Synthetic peptide
DIQMTQSPSSLSASVGDRVTITCQASETIYSSLAWYQQKPGKAPKLLIYGASNLESGVPSRFSGSGSGTDFTFTISSMQPEDIATYYCQSGVYSAGLTFGGGTKVEIKGGGGSGGGGSGGGGSEVQLLESGGGLVQPGGSLRLSCAASGFTFSSYGVSWVRQAPGKGLEWIGYNDPVFGSIYYASWVKGRFTISSDNSKNTLYLQMNSLRAEDTAVYYCAKDRSYVSSSGYHFNLWGQGTLVTVSSGGGGSEVQLVESGGGLVQPGGSLKLSCAASGFTFNKYAMNWVRQAPGKGLEWVARIRSKYNNYATYYADSVKDRFTISRDDSKNTAYLQMNNLKTEDTAVYYCVRHGNFGNSYISYWAYWGQGTLVTVSSGGGGSGGGGSGGGGSQTVVTQEPSLTVSPGGTVTLTCGSSTGAVTSGNYPNWVQQKPGQAPRGLIGGTKFLAPGTPARFSGSLLGGKAALTLSGVQPEDEAEYYCVLWYSNRWVFGGGTKLTVLGGGGDKTHTCPPCPAPELLGGPSVFLFPPKPKDTLMISRTPEVTCVVVDVSHEDPEVKFNWYVDGVEVHNAKTKPCEEQYGSTYRCVSVLTVLHQDWLNGKEYKCKVSNKALPAPIEKTISKAKGQPREPQVYTLPPSREEMTKNQVSLTCLVKGFYPSDIAVEWESNGQPENNYKTTPPVLDSDGSFFLYSKLTVDKSRWQQGNVFSCSVMHEALHNHYTQKSLSLSPGGGGSGGGGSGGGGSGGGGSGGGGSGGGGSDKTHTCPPCPAPELLGGPSVFLFPPKPKDTLMISRTPEVTCVVVDVSHEDPEVKFNWYVDGVEVHNAKTKPCEEQYGSTYRCVSVLTVLHQDWLNGKEYKCKVSNKALPAPIEKTISKAKGQPREPQVYTLPPSREEMTKNQVSLTCLVKGFYPSDIAVEWESNGQPENNYKTTPPVLDSDGSFFLYSKLTVDKSRWQQGNVFSCSVMHEALHNHYTQKSLSLSPGK

SEQ ID NO: 309 - protein, 986 aa, Artificial Sequence
  Synthetic peptide
DIQMTQSPSSLSASVGDRVTITCQASETIYSSLAWYQQKPGKAPKLLIYGASNLESGVPSRFSGSGSGTDFTFTISSMQPEDIATYYCQSGVYSAGLTFGCGTKVEIKGGGGSGGGGSGGGGSEVQLLESGGGLVQPGGSLRLSCAASGFTFSSYGVSWVRQAPGKCLEWIGYNDPVFGSIYYASWVKGRFTISSDNSKNTLYLQMNSLRAEDTAVYYCAKDRSYVSSSGYHFNLWGQGTLVTVSSGGGGSEVQLVESGGGLVQPGGSLKLSCAASGFTFNKYAMNWVRQAPGKGLEWVARIRSKYNNYATYYADSVKDRFTISRDDSKNTAYLQMNNLKTEDTAVYYCVRHGNFGNSYISYWAYWGQGTLVTVSSGGGGSGGGGSGGGGSQTVVTQEPSLTVSPGGTVTLTCGSSTGAVTSGNYPNWVQQKPGQAPRGLIGGTKFLAPGTPARFSGSLLGGKAALTLSGVQPEDEAEYYCVLWYSNRWVFGGGTKLTVLGGGGDKTHTCPPCPAPELLGGPSVFLFPPKPKDTLMISRTPEVTCVVVDVSHEDPEVKFNWYVDGVEVHNAKTKPCEEQYGSTYRCVSVLTVLHQDWLNGKEYKCKVSNKALPAPIEKTISKAKGQPREPQVYTLPPSREEMTKNQVSLTCLVKGFYPSDIAVEWESNGQPENNYKTTPPVLDSDGSFFLYSKLTVDKSRWQQGNVFSCSVMHEALHNHYTQKSLSLSPGGGGSGGGGSGGGGSGGGGSGGGGSGGGGSDKTHTCPPCPAPELLGGPSVFLFPPKPKDTLMISRTPEVTCVVVDVSHEDPEVKFNWYVDGVEVHNAKTKPCEEQYGSTYRCVSVLTVLHQDWLNGKEYKCKVSNKALPAPIEKTISKAKGQPREPQVYTLPPSREEMTKNQVSLTCLVKGFYPSDIAVEWESNGQPENNYKTTPPVLDSDGSFFLYSKLTVDKSRWQQGNVFSCSVMHEALHNHYTQKSLSLSPGK

SEQ ID NO: 310 - protein, 986 aa, Artificial Sequence
  Synthetic peptide
DIQMTQSPSSLSASVGDRVTITCQASETIYSSLAWYQQKPGKAPKLLIYGASNLESGVPSRFSGSGSGTDFTFTISGLQPEDIATYYCQSGVYSAGLTFGGGTKVEIKGGGGSGGGGSGGGGSEVQLLESGGGLVQPGGSLRLSCAASGFTFSSYGVSWVRQAPGKGLEWIGYNDPVFGSIYYASWVKGRFTISSDNSKNTLYLQMNSLRAEDTAVYYCAKDRSYVSSSGYHFNLWGQGTLVTVSSGGGGSEVQLVESGGGLVQPGGSLKLSCAASGFTFNKYAMNWVRQAPGKGLEWVARIRSKYNNYATYYADSVKDRFTISRDDSKNTAYLQMNNLKTEDTAVYYCVRHGNFGNSYISYWAYWGQGTLVTVSSGGGGSGGGGSGGGGSQTVVTQEPSLTVSPGGTVTLTCGSSTGAVTSGNYPNWVQQKPGQAPRGLIGGTKFLAPGTPARFSGSLLGGKAALTLSGVQPEDEAEYYCVLWYSNRWVFGGGTKLTVLGGGGDKTHTCPPCPAPELLGGPSVFLFPPKPKDTLMISRTPEVTCVVVDVSHEDPEVKFNWYVDGVEVHNAKTKPCEEQYGSTYRCVSVLTVLHQDWLNGKEYKCKVSNKALPAPIEKTISKAKGQPREPQVYTLPPSREEMTKNQVSLTCLVKGFYPSDIAVEWESNGQPENNYKTTPPVLDSDGSFFLYSKLTVDKSRWQQGNVFSCSVMHEALHNHYTQKSLSLSPGGGGSGGGGSGGGGSGGGGSGGGGSGGGGSDKTHTCPPCPAPELLGGPSVFLFPPKPKDTLMISRTPEVTCVVVDVSHEDPEVKFNWYVDGVEVHNAKTKPCEEQYGSTYRCVSVLTVLHQDWLNGKEYKCKVSNKALPAPIEKTISKAKGQPREPQVYTLPPSREEMTKNQVSLTCLVKGFYPSDIAVEWESNGQPENNYKTTPPVLDSDGSFFLYSKLTVDKSRWQQGNVFSCSVMHEALHNHYTQKSLSLSPGK

SEQ ID NO: 311 - protein, 986 aa, Artificial Sequence
  Synthetic peptide
DIQMTQSPSSLSASVGDRVTITCQASETIYSSLAWYQQKPGKAPKLLIYGASNLESGVPSRFSGSGSGTDFTFTISGLQPEDIATYYCQSGVYSAGLTFGCGTKVEIKGGGGSGGGGSGGGGSEVQLLESGGGLVQPGGSLRLSCAASGFTFSSYGVSWVRQAPGKCLEWIGYNDPVFGSIYYASWVKGRFTISSDNSKNTLYLQMNSLRAEDTAVYYCAKDRSYVSSSGYHFNLWGQGTLVTVSSGGGGSEVQLVESGGGLVQPGGSLKLSCAASGFTFNKYAMNWVRQAPGKGLEWVARIRSKYNNYATYYADSVKDRFTISRDDSKNTAYLQMNNLKTEDTAVYYCVRHGNFGNSYISYWAYWGQGTLVTVSSGGGGSGGGGSGGGGSQTVVTQEPSLTVSPGGTVTLTCGSSTGAVTSGNYPNWVQQKPGQAPRGLIGGTKFLAPGTPARFSGSLLGGKAALTLSGVQPEDEAEYYCVLWYSNRWVFGGGTKLTVLGGGGDKTHTCPPCPAPELLGGPSVFLFPPKPKDTLMISRTPEVTCVVVDVSHEDPEVKFNWYVDGVEVHNAKTKPCEEQYGSTYRCVSVLTVLHQDWLNGKEYKCKVSNKALPAPIEKTISKAKGQPREPQVYTLPPSREEMTKNQVSLTCLVKGFYPSDIAVEWESNGQPENNYKTTPPVLDSDGSFFLYSKLTVDKSRWQQGNVFSCSVMHEALHNHYTQKSLSLSPGGGGSGGGGSGGGGSGGGGSGGGGSGGGGSDKTHTCPPCPAPELLGGPSVFLFPPKPKDTLMISRTPEVTCVVVDVSHEDPEVKFNWYVDGVEVHNAKTKPCEEQYGSTYRCVSVLTVLHQDWLNGKEYKCKVSNKALPAPIEKTISKAKGQPREPQVYTLPPSREEMTKNQVSLTCLVKGFYPSDIAVEWESNGQPENNYKTTPPVLDSDGSFFLYSKLTVDKSRWQQGNVFSCSVMHEALHNHYTQKSLSLSPGK

SEQ ID NO: 312 - protein, 986 aa, Artificial Sequence
  Synthetic peptide
DIQMTQSPSSLSASVGDRVTITCQASETIYSSLAWYQQKPGKAPKLLIYGASNLESGVPSRFSGSGSGTDFTFTISSLQPEDIATYYCQSGVYSAGLTFGGGTKVEIKGGGGSGGGGSGGGGSEVQLLESGGGLVQPGGSLRLSCAASGFTFSSYGVSWVRQAPGKGLEWVGYNDPVFGSIYYASWVKGRFTISSDNSKNTLYLQMNSLRAEDTAVYYCAKDRSYVSSSGYHFNLWGQGTLVTVSSGGGGSEVQLVESGGGLVQPGGSLKLSCAASGFTFNKYAMNWVRQAPGKGLEWVARIRSKYNNYATYYADSVKDRFTISRDDSKNTAYLQMNNLKTEDTAVYYCVRHGNFGNSYISYWAYWGQGTLVTVSSGGGGSGGGGSGGGGSQTVVTQEPSLTVSPGGTVTLTCGSSTGAVTSGNYPNWVQQKPGQAPRGLIGGTKFLAPGTPARFSGSLLGGKAALTLSGVQPEDEAEYYCVLWYSNRWVFGGGTKLTVLGGGGDKTHTCPPCPAPELLGGPSVFLFPPKPKDTLMISRTPEVTCVVVDVSHEDPEVKFNWYVDGVEVHNAKTKPCEEQYGSTYRCVSVLTVLHQDWLNGKEYKCKVSNKALPAPIEKTISKAKGQPREPQVYTLPPSREEMTKNQVSLTCLVKGFYPSDIAVEWESNGQPENNYKTTPPVLDSDGSFFLYSKLTVDKSRWQQGNVFSCSVMHEALHNHYTQKSLSLSPGGGGSGGGGSGGGGSGGGGSGGGGSGGGGSDKTHTCPPCPAPELLGGPSVFLFPPKPKDTLMISRTPEVTCVVVDVSHEDPEVKFNWYVDGVEVHNAKTKPCEEQYGSTYRCVSVLTVLHQDWLNGKEYKCKVSNKALPAPIEKTISKAKGQPREPQVYTLPPSREEMTKNQVSLTCLVKGFYPSDIAVEWESNGQPENNYKTTPPVLDSDGSFFLYSKLTVDKSRWQQGNVFSCSVMHEALHNHYTQKSLSLSPGK

SEQ ID NO: 313 - protein, 986 aa, Artificial Sequence
  Synthetic peptide
DIQMTQSPSSLSASVGDRVTITCQASETIYSSLAWYQQKPGKAPKLLIYGASNLESGVPSRFSGSGSGTDFTFTISSLQPEDIATYYCQSGVYSAGLTFGCGTKVEIKGGGGSGGGGSGGGGSEVQLLESGGGLVQPGGSLRLSCAASGFTFSSYGVSWVRQAPGKCLEWVGYNDPVFGSIYYASWVKGRFTISSDNSKNTLYLQMNSLRAEDTAVYYCAKDRSYVSSSGYHFNLWGQGTLVTVSSGGGGSEVQLVESGGGLVQPGGSLKLSCAASGFTFNKYAMNWVRQAPGKGLEWVARIRSKYNNYATYYADSVKDRFTISRDDSKNTAYLQMNNLKTEDTAVYYCVRHGNFGNSYISYWAYWGQGTLVTVSSGGGGSGGGGSGGGGSQTVVTQEPSLTVSPGGTVTLTCGSSTGAVTSGNYPNWVQQKPGQAPRGLIGGTKFLAPGTPARFSGSLLGGKAALTLSGVQPEDEAEYYCVLWYSNRWVFGGGTKLTVLGGGGDKTHTCPPCPAPELLGGPSVFLFPPKPKDTLMISRTPEVTCVVVDVSHEDPEVKFNWYVDGVEVHNAKTKPCEEQYGSTYRCVSVLTVLHQDWLNGKEYKCKVSNKALPAPIEKTISKAKGQPREPQVYTLPPSREEMTKNQVSLTCLVKGFYPSDIAVEWESNGQPENNYKTTPPVLDSDGSFFLYSKLTVDKSRWQQGNVFSCSVMHEALHNHYTQKSLSLSPGGGGSGGGGSGGGGSGGGGSGGGGSGGGGSDKTHTCPPCPAPELLGGPSVFLFPPKPKDTLMISRTPEVTCVVVDVSHEDPEVKFNWYVDGVEVHNAKTKPCEEQYGSTYRCVSVLTVLHQDWLNGKEYKCKVSNKALPAPIEKTISKAKGQPREPQVYTLPPSREEMTKNQVSLTCLVKGFYPSDIAVEWESNGQPENNYKTTPPVLDSDGSFFLYSKLTVDKSRWQQGNVFSCSVMHEALHNHYTQKSLSLSPGK

SEQ ID NO: 314 - protein, 7 aa, Artificial Sequence
  Synthetic peptide
NARMGVS

SEQ ID NO: 315 - protein, 16 aa, Artificial Sequence
  Synthetic peptide
NIFSNDEKSYSTSLKS

SEQ ID NO: 316 - protein, 14 aa, Artificial Sequence
  Synthetic peptide
IVGYGSGWYGYFDY

SEQ ID NO: 317 - protein, 11 aa, Artificial Sequence
  Synthetic peptide
RASQGIRNDLG

SEQ ID NO: 318 - protein, 7 aa, Artificial Sequence
  Synthetic peptide
AASSLQS

SEQ ID NO: 319 - protein, 9 aa, Artificial Sequence
  Synthetic peptide
LQHNSYPLT

SEQ ID NO: 320 - protein, 124 aa, Artificial Sequence
  Synthetic peptide
QVTLKESGPALVKPTETLTLTCTVSGFSLSNARMGVSWIRQPPGKALEWLANIFSNDEKSYSTSLKSRLTISKGTSKSQVVLTMTNMDPEDTATYYCARIVGYGSGWYGYFDYWGQGTLVTVSS

SEQ ID NO: 321 - protein, 108 aa, Artificial Sequence
  Synthetic peptide
DIQMTQSPSSLSASVGDRVTITCRASQGIRNDLGWYQQKPGKAPQRLIYAASSLQSGVPSRFSGSGSGTEFTLTISSLQPEDFATYYCLQHNSYPLTFGGGTKVEIKS

SEQ ID NO: 322 - protein, 246 aa, Artificial Sequence
  Synthetic peptide
QVTLKESGPALVKPTETLTLTCTVSGFSLSNARMGVSWIRQPPGKALEWLANIFSNDEKSYSTSLKSRLTISKGTSKSQVVLTMTNMDPEDTATYYCARIVGYGSGWYGYFDYWGQGTLVTVSSGGGGSGGGGSGGGGSDIQMTQSPSSLSASVGDRVTITCRASQGIRNDLGWYQQKPGKAPQRLIYAASSLQSGVPSRFSGSGSGTEFTLTISSLQPEDFATYYCLQHNSYPLTFGGGTKVEIK

SEQ ID NO: 323 - protein, 501 aa, Artificial Sequence
  Synthetic peptide
QVTLKESGPALVKPTETLTLTCTVSGFSLSNARMGVSWIRQPPGKALEWLANIFSNDEKSYSTSLKSRLTISKGTSKSQVVLTMTNMDPEDTATYYCARIVGYGSGWYGYFDYWGQGTLVTVSSGGGGSGGGGSGGGGSDIQMTQSPSSLSASVGDRVTITCRASQGIRNDLGWYQQKPGKAPQRLIYAASSLQSGVPSRFSGSGSGTEFTLTISSLQPEDFATYYCLQHNSYPLTFGGGTKVEIKSGGGGSEVQLVESGGGLVQPGGSLKLSCAASGFTFNKYAMNWVRQAPGKGLEWVARIRSKYNNYATYYADSVKDRFTISRDDSKNTAYLQMNNLKTEDTAVYYCVRHGNFGNSYISYWAYWGQGTLVTVSSGGGGSGGGGSGGGGSQTVVTQEPSLTVSPGGTVTLTCGSSTGAVTSGNYPNWVQQKPGQAPRGLIGGTKFLAPGTPARFSGSLLGGKAALTLSGVQPEDEAEYYCVLWYSNRWVFGGGTKLTVL

SEQ ID NO: 324 - protein, 989 aa, Artificial Sequence
  Synthetic peptide
QVTLKESGPALVKPTETLTLTCTVSGFSLSNARMGVSWIRQPPGKALEWLANIFSNDEKSYSTSLKSRLTISKGTSKSQVVLTMTNMDPEDTATYYCARIVGYGSGWYGYFDYWGQGTLVTVSSGGGGSGGGGSGGGGSDIQMTQSPSSLSASVGDRVTITCRASQGIRNDLGWYQQKPGKAPQRLIYAASSLQSGVPSRFSGSGSGTEFTLTISSLQPEDFATYYCLQHNSYPLTFGGGTKVEIKSGGGGSEVQLVESGGGLVQPGGSLKLSCAASGFTFNKYAMNWVRQAPGKGLEWVARIRSKYNNYATYYADSVKDRFTISRDDSKNTAYLQMNNLKTEDTAVYYCVRHGNFGNSYISYWAYWGQGTLVTVSSGGGGSGGGGSGGGGSQTVVTQEPSLTVSPGGTVTLTCGSSTGAVTSGNYPNWVQQKPGQAPRGLIGGTKFLAPGTPARFSGSLLGGKAALTLSGVQPEDEAEYYCVLWYSNRWVFGGGTKLTVLGGGGDKTHTCPPCPAPELLGGPSVFLFPPKPKDTLMISRTPEVTCVVVDVSHEDPEVKFNWYVDGVEVHNAKTKPCEEQYGSTYRCVSVLTVLHQDWLNGKEYKCKVSNKALPAPIEKTISKAKGQPREPQVYTLPPSREEMTKNQVSLTCLVKGFYPSDIAVEWESNGQPENNYKTTPPVLDSDGSFFLYSKLTVDKSRWQQGNVFSCSVMHEALHNHYTQKSLSLSPGKGGGGSGGGGSGGGGSGGGGSGGGGSGGGGSDKTHTCPPCPAPELLGGPSVFLFPPKPKDTLMISRTPEVTCVVVDVSHEDPEVKFNWYVDGVEVHNAKTKPCEEQYGSTYRCVSVLTVLHQDWLNGKEYKCKVSNKALPAPIEKTISKAKGQPREPQVYTLPPSREEMTKNQVSLTCLVKGFYPSDIAVEWESNGQPENNYKTTPPVLDSDGSFFLYSKLTVDKSRWQQGNVFSCSVMHEALHNHYTQKSLSLSPGK

SEQ ID NO: 325 - protein, 124 aa, Artificial Sequence
  Synthetic peptide
QVTLKESGPALVKPTETLTLTCTVSGFSLSNARMGVSWIRQPPGKCLEWLANIFSNDEKSYSTSLKSRLTISKGTSKSQVVLTMTNMDPEDTATYYCARIVGYGSGWYGYFDYWGQGTLVTVSS

SEQ ID NO: 326 - protein, 107 aa, Artificial Sequence
  Synthetic peptide
DIQMTQSPSSLSASVGDRVTITCRASQGIRNDLGWYQQKPGKAPQRLIYAASSLQSGVPSRFSGSGSGTEFTLTISSLQPEDFATYYCLQHNSYPLTFGCGTKVEIK

SEQ ID NO: 327 - protein, 247 aa, Artificial Sequence
  Synthetic peptide
QVTLKESGPALVKPTETLTLTCTVSGFSLSNARMGVSWIRQPPGKCLEWLANIFSNDEKSYSTSLKSRLTISKGTSKSQVVLTMTNMDPEDTATYYCARIVGYGSGWYGYFDYWGQGTLVTVSSGGGGSGGGGSGGGGSDIQMTQSPSSLSASVGDRVTITCRASQGIRNDLGWYQQKPGKAPQRLIYAASSLQSGVPSRFSGSGSGTEFTLTISSLQPEDFATYYCLQHNSYPLTFGCGTKVEIKS

SEQ ID NO: 328 - protein, 501 aa, Artificial Sequence
  Synthetic peptide
QVTLKESGPALVKPTETLTLTCTVSGFSLSNARMGVSWIRQPPGKCLEWLANIFSNDEKSYSTSLKSRLTISKGTSKSQVVLTMTNMDPEDTATYYCARIVGYGSGWYGYFDYWGQGTLVTVSSGGGGSGGGGSGGGGSDIQMTQSPSSLSASVGDRVTITCRASQGIRNDLGWYQQKPGKAPQRLIYAASSLQSGVPSRFSGSGSGTEFTLTISSLQPEDFATYYCLQHNSYPLTFGCGTKVEIKSGGGGSEVQLVESGGGLVQPGGSLKLSCAASGFTFNKYAMNWVRQAPGKGLEWVARIRSKYNNYATYYADSVKDRFTISRDDSKNTAYLQMNNLKTEDTAVYYCVRHGNFGNSYISYWAYWGQGTLVTVSSGGGGSGGGGSGGGGSQTVVTQEPSLTVSPGGTVTLTCGSSTGAVTSGNYPNWVQQKPGQAPRGLIGGTKFLAPGTPARFSGSLLGGKAALTLSGVQPEDEAEYYCVLWYSNRWVFGGGTKLTVL

SEQ ID NO: 329 - protein, 989 aa, Artificial Sequence
  Synthetic peptide
QVTLKESGPALVKPTETLTLTCTVSGFSLSNARMGVSWIRQPPGKCLEWLANIFSNDEKSYSTSLKSRLTISKGTSKSQVVLTMTNMDPEDTATYYCARIVGYGSGWYGYFDYWGQGTLVTVSSGGGGSGGGGSGGGGSDIQMTQSPSSLSASVGDRVTITCRASQGIRNDLGWYQQKPGKAPQRLIYAASSLQSGVPSRFSGSGSGTEFTLTISSLQPEDFATYYCLQHNSYPLTFGCGTKVEIKSGGGGSEVQLVESGGGLVQPGGSLKLSCAASGFTFNKYAMNWVRQAPGKGLEWVARIRSKYNNYATYYADSVKDRFTISRDDSKNTAYLQMNNLKTEDTAVYYCVRHGNFGNSYISYWAYWGQGTLVTVSSGGGGSGGGGSGGGGSQTVVTQEPSLTVSPGGTVTLTCGSSTGAVTSGNYPNWVQQKPGQAPRGLIGGTKFLAPGTPARFSGSLLGGKAALTLSGVQPEDEAEYYCVLWYSNRWVFGGGTKLTVLGGGGDKTHTCPPCPAPELLGGPSVFLFPPKPKDTLMISRTPEVTCVVVDVSHEDPEVKFNWYVDGVEVHNAKTKPCEEQYGSTYRCVSVLTVLHQDWLNGKEYKCKVSNKALPAPIEKTISKAKGQPREPQVYTLPPSREEMTKNQVSLTCLVKGFYPSDIAVEWESNGQPENNYKTTPPVLDSDGSFFLYSKLTVDKSRWQQGNVFSCSVMHEALHNHYTQKSLSLSPGKGGGGSGGGGSGGGGSGGGGSGGGGSGGGGSDKTHTCPPCPAPELLGGPSVFLFPPKPKDTLMISRTPEVTCVVVDVSHEDPEVKFNWYVDGVEVHNAKTKPCEEQYGSTYRCVSVLTVLHQDWLNGKEYKCKVSNKALPAPIEKTISKAKGQPREPQVYTLPPSREEMTKNQVSLTCLVKGFYPSDIAVEWESNGQPENNYKTTPPVLDSDGSFFLYSKLTVDKSRWQQGNVFSCSVMHEALHNHYTQKSLSLSPGK

SEQ ID NO: 330 - protein, 7 aa, Artificial Sequence
  Synthetic peptide
NARMGVS

SEQ ID NO: 331 - protein, 16 aa, Artificial Sequence
  Synthetic peptide
HIFSNDEKSYSTSLKN

SEQ ID NO: 332 - protein, 14 aa, Artificial Sequence
  Synthetic peptide
IVGYGSGWYGFFDY

SEQ ID NO: 333 - protein, 11 aa, Artificial Sequence
  Synthetic peptide
RASQGIRNDLG

SEQ ID NO: 334 - protein, 7 aa, Artificial Sequence
  Synthetic peptide
AASTLQS

SEQ ID NO: 335 - protein, 9 aa, Artificial Sequence
  Synthetic peptide
LQHNSYPLT

SEQ ID NO: 336 - protein, 124 aa, Artificial Sequence
  Synthetic peptide
QVTLKESGPTLVKPTETLTLTCTLSGFSLNNARMGVSWIRQPPGKALEWLAHIFSNDEKSYSTSLKNRLTISKDSSKTQVVLTMTNVDPVDTATYYCARIVGYGSGWYGFFDYWGQGTLVTVSS

SEQ ID NO: 337 - protein, 107 aa, Artificial Sequence
  Synthetic peptide
DIQMTQSPSSLSASVGDRVTITCRASQGIRNDLGWYQQKPGKAPKRLIYAASTLQSGVPSRFSGSGSGTEFTLTISSLQPEDFATYYCLQHNSYPLTFGGGTKVEIK

SEQ ID NO: 338 - protein, 247 aa, Artificial Sequence
  Synthetic peptide
QVTLKESGPTLVKPTETLTLTCTLSGFSLNNARMGVSWIRQPPGKALEWLAHIFSNDEKSYSTSLKNRLTISKDSSKTQVVLTMTNVDPVDTATYYCARIVGYGSGWYGFFDYWGQGTLVTVSSGGGGSGGGGSGGGGSDIQMTQSPSSLSASVGDRVTITCRASQGIRNDLGWYQQKPGKAPKRLIYAASTLQSGVPSRFSGSGSGTEFTLTISSLQPEDFATYYCLQHNSYPLTFGGGTKVEIKS

SEQ ID NO: 339 - protein, 501 aa, Artificial Sequence
  Synthetic peptide
QVTLKESGPTLVKPTETLTLTCTLSGFSLNNARMGVSWIRQPPGKALEWLAHIFSNDEKSYSTSLKNRLTISKDSSKTQVVLTMTNVDPVDTATYYCARIVGYGSGWYGFFDYWGQGTLVTVSSGGGGSGGGGSGGGGSDIQMTQSPSSLSASVGDRVTITCRASQGIRNDLGWYQQKPGKAPKRLIYAASTLQSGVPSRFSGSGSGTEFTLTISSLQPEDFATYYCLQHNSYPLTFGGGTKVEIKSGGGGSEVQLVESGGGLVQPGGSLKLSCAASGFTFNKYAMNWVRQAPGKGLEWVARIRSKYNNYATYYADSVKDRFTISRDDSKNTAYLQMNNLKTEDTAVYYCVRHGNFGNSYISYWAYWGQGTLVTVSSGGGGSGGGGSGGGGSQTVVTQEPSLTVSPGGTVTLTCGSSTGAVTSGNYPNWVQQKPGQAPRGLIGGTKFLAPGTPARFSGSLLGGKAALTLSGVQPEDEAEYYCVLWYSNRWVFGGGTKLTVL

SEQ ID NO: 340 - protein, 989 aa, Artificial Sequence
  Synthetic peptide
QVTLKESGPTLVKPTETLTLTCTLSGFSLNNARMGVSWIRQPPGKALEWLAHIFSNDEKSYSTSLKNRLTISKDSSKTQVVLTMTNVDPVDTATYYCARIVGYGSGWYGFFDYWGQGTLVTVSSGGGGSGGGGSGGGGSDIQMTQSPSSLSASVGDRVTITCRASQGIRNDLGWYQQKPGKAPKRLIYAASTLQSGVPSRFSGSGSGTEFTLTISSLQPEDFATYYCLQHNSYPLTFGGGTKVEIKSGGGGSEVQLVESGGGLVQPGGSLKLSCAASGFTFNKYAMNWVRQAPGKGLEWVARIRSKYNNYATYYADSVKDRFTISRDDSKNTAYLQMNNLKTEDTAVYYCVRHGNFGNSYISYWAYWGQGTLVTVSSGGGGSGGGGSGGGGSQTVVTQEPSLTVSPGGTVTLTCGSSTGAVTSGNYPNWVQQKPGQAPRGLIGGTKFLAPGTPARFSGSLLGGKAALTLSGVQPEDEAEYYCVLWYSNRWVFGGGTKLTVLGGGGDKTHTCPPCPAPELLGGPSVFLFPPKPKDTLMISRTPEVTCVVVDVSHEDPEVKFNWYVDGVEVHNAKTKPCEEQYGSTYRCVSVLTVLHQDWLNGKEYKCKVSNKALPAPIEKTISKAKGQPREPQVYTLPPSREEMTKNQVSLTCLVKGFYPSDIAVEWESNGQPENNYKTTPPVLDSDGSFFLYSKLTVDKSRWQQGNVFSCSVMHEALHNHYTQKSLSLSPGKGGGGSGGGGSGGGGSGGGGSGGGGSGGGGSDKTHTCPPCPAPELLGGPSVFLFPPKPKDTLMISRTPEVTCVVVDVSHEDPEVKFNWYVDGVEVHNAKTKPCEEQYGSTYRCVSVLTVLHQDWLNGKEYKCKVSNKALPAPIEKTISKAKGQPREPQVYTLPPSREEMTKNQVSLTCLVKGFYPSDIAVEWESNGQPENNYKTTPPVLDSDGSFFLYSKLTVDKSRWQQGNVFSCSVMHEALHNHYTQKSLSLSPGK

SEQ ID NO: 341 - protein, 124 aa, Artificial Sequence
  Synthetic peptide
QVTLKESGPTLVKPTETLTLTCTLSGFSLNNARMGVSWIRQPPGKCLEWLAHIFSNDEKSYSTSLKNRLTISKDSSKTQVVLTMTNVDPVDTATYYCARIVGYGSGWYGFFDYWGQGTLVTVSS

SEQ ID NO: 342 - protein, 107 aa, Artificial Sequence
  Synthetic peptide
DIQMTQSPSSLSASVGDRVTITCRASQGIRNDLGWYQQKPGKAPKRLIYAASTLQSGVPSRFSGSGSGTEFTLTISSLQPEDFATYYCLQHNSYPLTFGCGTKVEIK

SEQ ID NO: 343 - protein, 247 aa, Artificial Sequence
  Synthetic peptide
QVTLKESGPTLVKPTETLTLTCTLSGFSLNNARMGVSWIRQPPGKCLEWLAHIFSNDEKSYSTSLKNRLTISKDSSKTQVVLTMTNVDPVDTATYYCARIVGYGSGWYGFFDYWGQGTLVTVSSGGGGSGGGGSGGGGSDIQMTQSPSSLSASVGDRVTITCRASQGIRNDLGWYQQKPGKAPKRLIYAASTLQSGVPSRFSGSGSGTEFTLTISSLQPEDFATYYCLQHNSYPLTFGCGTKVEIKS

SEQ ID NO: 344 - protein, 501 aa, Artificial Sequence
  Synthetic peptide
QVTLKESGPTLVKPTETLTLTCTLSGFSLNNARMGVSWIRQPPGKCLEWLAHIFSNDEKSYSTSLKNRLTISKDSSKTQVVLTMTNVDPVDTATYYCARIVGYGSGWYGFFDYWGQGTLVTVSSGGGGSGGGGSGGGGSDIQMTQSPSSLSASVGDRVTITCRASQGIRNDLGWYQQKPGKAPKRLIYAASTLQSGVPSRFSGSGSGTEFTLTISSLQPEDFATYYCLQHNSYPLTFGCGTKVEIKSGGGGSEVQLVESGGGLVQPGGSLKLSCAASGFTFNKYAMNWVRQAPGKGLEWVARIRSKYNNYATYYADSVKDRFTISRDDSKNTAYLQMNNLKTEDTAVYYCVRHGNFGNSYISYWAYWGQGTLVTVSSGGGGSGGGGSGGGGSQTVVTQEPSLTVSPGGTVTLTCGSSTGAVTSGNYPNWVQQKPGQAPRGLIGGTKFLAPGTPARFSGSLLGGKAALTLSGVQPEDEAEYYCVLWYSNRWVFGGGTKLTVL

SEQ ID NO: 345 - protein, 989 aa, Artificial Sequence
  Synthetic peptide
QVTLKESGPTLVKPTETLTLTCTLSGFSLNNARMGVSWIRQPPGKCLEWLAHIFSNDEKSYSTSLKNRLTISKDSSKTQVVLTMTNVDPVDTATYYCARIVGYGSGWYGFFDYWGQGTLVTVSSGGGGSGGGGSGGGGSDIQMTQSPSSLSASVGDRVTITCRASQGIRNDLGWYQQKPGKAPKRLIYAASTLQSGVPSRFSGSGSGTEFTLTISSLQPEDFATYYCLQHNSYPLTFGCGTKVEIKSGGGGSEVQLVESGGGLVQPGGSLKLSCAASGFTFNKYAMNWVRQAPGKGLEWVARIRSKYNNYATYYADSVKDRFTISRDDSKNTAYLQMNNLKTEDTAVYYCVRHGNFGNSYISYWAYWGQGTLVTVSSGGGGSGGGGSGGGGSQTVVTQEPSLTVSPGGTVTLTCGSSTGAVTSGNYPNWVQQKPGQAPRGLIGGTKFLAPGTPARFSGSLLGGKAALTLSGVQPEDEAEYYCVLWYSNRWVFGGGTKLTVLGGGGDKTHTCPPCPAPELLGGPSVFLFPPKPKDTLMISRTPEVTCVVVDVSHEDPEVKFNWYVDGVEVHNAKTKPCEEQYGSTYRCVSVLTVLHQDWLNGKEYKCKVSNKALPAPIEKTISKAKGQPREPQVYTLPPSREEMTKNQVSLTCLVKGFYPSDIAVEWESNGQPENNYKTTPPVLDSDGSFFLYSKLTVDKSRWQQGNVFSCSVMHEALHNHYTQKSLSLSPGKGGGGSGGGGSGGGGSGGGGSGGGGSGGGGSDKTHTCPPCPAPELLGGPSVFLFPPKPKDTLMISRTPEVTCVVVDVSHEDPEVKFNWYVDGVEVHNAKTKPCEEQYGSTYRCVSVLTVLHQDWLNGKEYKCKVSNKALPAPIEKTISKAKGQPREPQVYTLPPSREEMTKNQVSLTCLVKGFYPSDIAVEWESNGQPENNYKTTPPVLDSDGSFFLYSKLTVDKSRWQQGNVFSCSVMHEALHNHYTQKSLSLSPGK

SEQ ID NO: 346 - protein, 7 aa, Artificial Sequence
  Synthetic peptide
NARMAVS

SEQ ID NO: 347 - protein, 16 aa, Artificial Sequence
  Synthetic peptide
HIFSNDEKSYSTSLKS

SEQ ID NO: 348 - protein, 14 aa, Artificial Sequence
  Synthetic peptide
IVGYGSGWYGYFDY

SEQ ID NO: 349 - protein, 11 aa, Artificial Sequence
  Synthetic peptide
RASQDIRNDLG

SEQ ID NO: 350 - protein, 7 aa, Artificial Sequence
  Synthetic peptide
AASTLQS

SEQ ID NO: 351 - protein, 9 aa, Artificial Sequence
  Synthetic peptide
LQHNSYPLT

SEQ ID NO: 352 - protein, 124 aa, Artificial Sequence
  Synthetic peptide
QVTLKESGPALVKPTETLTLTCTLSGFSLNNARMAVSWIRQPPGKTLEWLAHIFSNDEKSYSTSLKSRLTISKDTSKGQVVLTMTNMDPVDTATYYCARIVGYGSGWYGYFDYWGQGTLVTVSS

SEQ ID NO: 353 - protein, 107 aa, Artificial Sequence
  Synthetic peptide
DIQMTQSPSSLSASVGDRVTITCRASQDIRNDLGWYQQKPGKAPKRLIYAASTLQSGVPSRFSGSGSGTEFTLTISSLQPEDFATYYCLQHNSYPLTFGGGTKVEIK

SEQ ID NO: 354 - protein, 247 aa, Artificial Sequence
  Synthetic peptide
QVTLKESGPALVKPTETLTLTCTLSGFSLNNARMAVSWIRQPPGKTLEWLAHIFSNDEKSYSTSLKSRLTISKDTSKGQVVLTMTNMDPVDTATYYCARIVGYGSGWYGYFDYWGQGTLVTVSSGGGGSGGGGSGGGGSDIQMTQSPSSLSASVGDRVTITCRASQDIRNDLGWYQQKPGKAPKRLIYAASTLQSGVPSRFSGSGSGTEFTLTISSLQPEDFATYYCLQHNSYPLTFGGGTKVEIKS

SEQ ID NO: 355 - protein, 501 aa, Artificial Sequence
  Synthetic peptide
QVTLKESGPALVKPTETLTLTCTLSGFSLNNARMAVSWIRQPPGKTLEWLAHIFSNDEKSYSTSLKSRLTISKDTSKGQVVLTMTNMDPVDTATYYCARIVGYGSGWYGYFDYWGQGTLVTVSSGGGGSGGGGSGGGGSDIQMTQSPSSLSASVGDRVTITCRASQDIRNDLGWYQQKPGKAPKRLIYAASTLQSGVPSRFSGSGSGTEFTLTISSLQPEDFATYYCLQHNSYPLTFGGGTKVEIKSGGGGSEVQLVESGGGLVQPGGSLKLSCAASGFTFNKYAMNWVRQAPGKGLEWVARIRSKYNNYATYYADSVKDRFTISRDDSKNTAYLQMNNLKTEDTAVYYCVRHGNFGNSYISYWAYWGQGTLVTVSSGGGGSGGGGSGGGGSQTVVTQEPSLTVSPGGTVTLTCGSSTGAVTSGNYPNWVQQKPGQAPRGLIGGTKFLAPGTPARFSGSLLGGKAALTLSGVQPEDEAEYYCVLWYSNRWVFGGGTKLTVL

SEQ ID NO: 356 - protein, 989 aa, Artificial Sequence
  Synthetic peptide
QVTLKESGPALVKPTETLTLTCTLSGFSLNNARMAVSWIRQPPGKTLEWLAHIFSNDEKSYSTSLKSRLTISKDTSKGQVVLTMTNMDPVDTATYYCARIVGYGSGWYGYFDYWGQGTLVTVSSGGGGSGGGGSGGGGSDIQMTQSPSSLSASVGDRVTITCRASQDIRNDLGWYQQKPGKAPKRLIYAASTLQSGVPSRFSGSGSGTEFTLTISSLQPEDFATYYCLQHNSYPLTFGGGTKVEIKSGGGGSEVQLVESGGGLVQPGGSLKLSCAASGFTFNKYAMNWVRQAPGKGLEWVARIRSKYNNYATYYADSVKDRFTISRDDSKNTAYLQMNNLKTEDTAVYYCVRHGNFGNSYISYWAYWGQGTLVTVSSGGGGSGGGGSGGGGSQTVVTQEPSLTVSPGGTVTLTCGSSTGAVTSGNYPNWVQQKPGQAPRGLIGGTKFLAPGTPARFSGSLLGGKAALTLSGVQPEDEAEYYCVLWYSNRWVFGGGTKLTVLGGGGDKTHTCPPCPAPELLGGPSVFLFPPKPKDTLMISRTPEVTCVVVDVSHEDPEVKFNWYVDGVEVHNAKTKPCEEQYGSTYRCVSVLTVLHQDWLNGKEYKCKVSNKALPAPIEKTISKAKGQPREPQVYTLPPSREEMTKNQVSLTCLVKGFYPSDIAVEWESNGQPENNYKTTPPVLDSDGSFFLYSKLTVDKSRWQQGNVFSCSVMHEALHNHYTQKSLSLSPGKGGGGSGGGGSGGGGSGGGGSGGGGSGGGGSDKTHTCPPCPAPELLGGPSVFLFPPKPKDTLMISRTPEVTCVVVDVSHEDPEVKFNWYVDGVEVHNAKTKPCEEQYGSTYRCVSVLTVLHQDWLNGKEYKCKVSNKALPAPIEKTISKAKGQPREPQVYTLPPSREEMTKNQVSLTCLVKGFYPSDIAVEWESNGQPENNYKTTPPVLDSDGSFFLYSKLTVDKSRWQQGNVFSCSVMHEALHNHYTQKSLSLSPGK

SEQ ID NO: 357 - protein, 124 aa, Artificial Sequence
  Synthetic peptide
QVTLKESGPALVKPTETLTLTCTLSGFSLNNARMAVSWIRQPPGKCLEWLAHIFSNDEKSYSTSLKSRLTISKDTSKGQVVLTMTNMDPVDTATYYCARIVGYGSGWYGYFDYWGQGTLVTVSS

SEQ ID NO: 358 - protein, 107 aa, Artificial Sequence
  Synthetic peptide
DIQMTQSPSSLSASVGDRVTITCRASQDIRNDLGWYQQKPGKAPKRLIYAASTLQSGVPSRFSGSGSGTEFTLTISSLQPEDFATYYCLQHNSYPLTFGCGTKVEIK

SEQ ID NO: 359 - protein, 247 aa, Artificial Sequence
  Synthetic peptide
QVTLKESGPALVKPTETLTLTCTLSGFSLNNARMAVSWIRQPPGKCLEWLAHIFSNDEKSYSTSLKSRLTISKDTSKGQVVLTMTNMDPVDTATYYCARIVGYGSGWYGYFDYWGQGTLVTVSSGGGGSGGGGSGGGGSDIQMTQSPSSLSASVGDRVTITCRASQDIRNDLGWYQQKPGKAPKRLIYAASTLQSGVPSRFSGSGSGTEFTLTISSLQPEDFATYYCLQHNSYPLTFGCGTKVEIKS

SEQ ID NO: 360 - protein, 502 aa, Artificial Sequence
  Synthetic peptide
QVTLKESGPALVKPTETLTLTCTLSGFSLNNARMAVSWIRQPPGKCLEWLAHIFSNDEKSYSTSLKSRLTISKDTSKGQVVLTMTNMDPVDTATYYCARIVGYGSGWYGYFDYWGQGTLVTVSSGGGGSGGGGSGGGGSDIQMTQSPSSLSASVGDRVTITCRASQDIRNDLGWYQQKPGKAPKRLIYAASTLQSGVPSRFSGSGSGTEFTLTISSLQPEDFATYYCLQHNSYPLTFGCGTKVEIKSGGGGSEVQLVESGGGLVQPGGSLKLSCAASGFTFNKYAMNWVRQAPGKGLEWVARIRSKYNNYATYYADSVKDRFTISRDDSKNTAYLQMNNLKTEDTAVYYCVRHGNFGNSYISYWAYWGQGTLVTVSSGGGGSGGGGSGGGGSQTVVTQEPSLTVSPGGTVTLTCGSSTGAVTSGNYPNWVQQKPGQAPRGLIGGTKFLAPGTPARFSGSLLGGKAALTLSGVQPEDEAEYYCVLWYSNRWVFGGGTKLTVLG

SEQ ID NO: 361 - protein, 989 aa, Artificial Sequence
  Synthetic peptide
QVTLKESGPALVKPTETLTLTCTLSGFSLNNARMAVSWIRQPPGKCLEWLAHIFSNDEKSYSTSLKSRLTISKDTSKGQVVLTMTNMDPVDTATYYCARIVGYGSGWYGYFDYWGQGTLVTVSSGGGGSGGGGSGGGGSDIQMTQSPSSLSASVGDRVTITCRASQDIRNDLGWYQQKPGKAPKRLIYAASTLQSGVPSRFSGSGSGTEFTLTISSLQPEDFATYYCLQHNSYPLTFGCGTKVEIKSGGGGSEVQLVESGGGLVQPGGSLKLSCAASGFTFNKYAMNWVRQAPGKGLEWVARIRSKYNNYATYYADSVKDRFTISRDDSKNTAYLQMNNLKTEDTAVYYCVRHGNFGNSYISYWAYWGQGTLVTVSSGGGGSGGGGSGGGGSQTVVTQEPSLTVSPGGTVTLTCGSSTGAVTSGNYPNWVQQKPGQAPRGLIGGTKFLAPGTPARFSGSLLGGKAALTLSGVQPEDEAEYYCVLWYSNRWVFGGGTKLTVLGGGGDKTHTCPPCPAPELLGGPSVFLFPPKPKDTLMISRTPEVTCVVVDVSHEDPEVKFNWYVDGVEVHNAKTKPCEEQYGSTYRCVSVLTVLHQDWLNGKEYKCKVSNKALPAPIEKTISKAKGQPREPQVYTLPPSREEMTKNQVSLTCLVKGFYPSDIAVEWESNGQPENNYKTTPPVLDSDGSFFLYSKLTVDKSRWQQGNVFSCSVMHEALHNHYTQKSLSLSPGKGGGGSGGGGSGGGGSGGGGSGGGGSGGGGSDKTHTCPPCPAPELLGGPSVFLFPPKPKDTLMISRTPEVTCVVVDVSHEDPEVKFNWYVDGVEVHNAKTKPCEEQYGSTYRCVSVLTVLHQDWLNGKEYKCKVSNKALPAPIEKTISKAKGQPREPQVYTLPPSREEMTKNQVSLTCLVKGFYPSDIAVEWESNGQPENNYKTTPPVLDSDGSFFLYSKLTVDKSRWQQGNVFSCSVMHEALHNHYTQKSLSLSPGK

SEQ ID NO: 362 - protein, 7 aa, Artificial Sequence
  Synthetic peptide
NAKMGVS

SEQ ID NO: 363 - protein, 16 aa, Artificial Sequence
  Synthetic peptide
HIFSNDEKSYSTSLKS

SEQ ID NO: 364 - protein, 14 aa, Artificial Sequence
  Synthetic peptide
IVGYGSGWYGYFDY

SEQ ID NO: 365 - protein, 11 aa, Artificial Sequence
  Synthetic peptide
RASQDIRDDLG

SEQ ID NO: 366 - protein, 7 aa, Artificial Sequence
  Synthetic peptide
GASTLQS

SEQ ID NO: 367 - protein, 9 aa, Artificial Sequence
  Synthetic peptide
LQHNSYPLT

SEQ ID NO: 368 - protein, 124 aa, Artificial Sequence
  Synthetic peptide
QVTLKESGPALVKPTETLTLTCTLSGFSLNNAKMGVSWIRQPPGKALEWLAHIFSNDEKSYSTSLKSRLTISKDTSKGQVVLTMTNMDPVDTATYYCARIVGYGSGWYGYFDYWGQGTLVTVSS

SEQ ID NO: 369 - protein, 107 aa, Artificial Sequence
  Synthetic peptide
DIQMTQSPSSLSASVGDRVTITCRASQDIRDDLGWYQQKPGNAPKRLIYGASTLQSGVPSRFSGSGSGTEFTLTISSLQPEDFATYYCLQHNSYPLTFGGGTKVDIK

SEQ ID NO: 370 - protein, 247 aa, Artificial Sequence
  Synthetic peptide
QVTLKESGPALVKPTETLTLTCTLSGFSLNNAKMGVSWIRQPPGKALEWLAHIFSNDEKSYSTSLKSRLTISKDTSKGQVVLTMTNMDPVDTATYYCARIVGYGSGWYGYFDYWGQGTLVTVSSGGGGSGGGGSGGGGSDIQMTQSPSSLSASVGDRVTITCRASQDIRDDLGWYQQKPGNAPKRLIYGASTLQSGVPSRFSGSGSGTEFTLTISSLQPEDFATYYCLQHNSYPLTFGGGTKVDIKS

SEQ ID NO: 371 - protein, 501 aa, Artificial Sequence
  Synthetic peptide
QVTLKESGPALVKPTETLTLTCTLSGFSLNNAKMGVSWIRQPPGKALEWLAHIFSNDEKSYSTSLKSRLTISKDTSKGQVVLTMTNMDPVDTATYYCARIVGYGSGWYGYFDYWGQGTLVTVSSGGGGSGGGGSGGGGSDIQMTQSPSSLSASVGDRVTITCRASQDIRDDLGWYQQKPGNAPKRLIYGASTLQSGVPSRFSGSGSGTEFTLTISSLQPEDFATYYCLQHNSYPLTFGGGTKVDIKSGGGGSEVQLVESGGGLVQPGGSLKLSCAASGFTFNKYAMNWVRQAPGKGLEWVARIRSKYNNYATYYADSVKDRFTISRDDSKNTAYLQMNNLKTEDTAVYYCVRHGNFGNSYISYWAYWGQGTLVTVSSGGGGSGGGGSGGGGSQTVVTQEPSLTVSPGGTVTLTCGSSTGAVTSGNYPNWVQQKPGQAPRGLIGGTKFLAPGTPARFSGSLLGGKAALTLSGVQPEDEAEYYCVLWYSNRWVFGGGTKLTVL

SEQ ID NO: 372 - protein, 989 aa, Artificial Sequence
  Synthetic peptide
QVTLKESGPALVKPTETLTLTCTLSGFSLNNAKMGVSWIRQPPGKALEWLAHIFSNDEKSYSTSLKSRLTISKDTSKGQVVLTMTNMDPVDTATYYCARIVGYGSGWYGYFDYWGQGTLVTVSSGGGGSGGGGSGGGGSDIQMTQSPSSLSASVGDRVTITCRASQDIRDDLGWYQQKPGNAPKRLIYGASTLQSGVPSRFSGSGSGTEFTLTISSLQPEDFATYYCLQHNSYPLTFGGGTKVDIKSGGGGSEVQLVESGGGLVQPGGSLKLSCAASGFTFNKYAMNWVRQAPGKGLEWVARIRSKYNNYATYYADSVKDRFTISRDDSKNTAYLQMNNLKTEDTAVYYCVRHGNFGNSYISYWAYWGQGTLVTVSSGGGGSGGGGSGGGGSQTVVTQEPSLTVSPGGTVTLTCGSSTGAVTSGNYPNWVQQKPGQAPRGLIGGTKFLAPGTPARFSGSLLGGKAALTLSGVQPEDEAEYYCVLWYSNRWVFGGGTKLTVLGGGGDKTHTCPPCPAPELLGGPSVFLFPPKPKDTLMISRTPEVTCVVVDVSHEDPEVKFNWYVDGVEVHNAKTKPCEEQYGSTYRCVSVLTVLHQDWLNGKEYKCKVSNKALPAPIEKTISKAKGQPREPQVYTLPPSREEMTKNQVSLTCLVKGFYPSDIAVEWESNGQPENNYKTTPPVLDSDGSFFLYSKLTVDKSRWQQGNVFSCSVMHEALHNHYTQKSLSLSPGKGGGGSGGGGSGGGGSGGGGSGGGGSGGGGSDKTHTCPPCPAPELLGGPSVFLFPPKPKDTLMISRTPEVTCVVVDVSHEDPEVKFNWYVDGVEVHNAKTKPCEEQYGSTYRCVSVLTVLHQDWLNGKEYKCKVSNKALPAPIEKTISKAKGQPREPQVYTLPPSREEMTKNQVSLTCLVKGFYPSDIAVEWESNGQPENNYKTTPPVLDSDGSFFLYSKLTVDKSRWQQGNVFSCSVMHEALHNHYTQKSLSLSPGK

SEQ ID NO: 373 - protein, 124 aa, Artificial Sequence
  Synthetic peptide
QVTLKESGPALVKPTETLTLTCTLSGFSLNNAKMGVSWIRQPPGKCLEWLAHIFSNDEKSYSTSLKSRLTISKDTSKGQVVLTMTNMDPVDTATYYCARIVGYGSGWYGYFDYWGQGTLVTVSS

SEQ ID NO: 374 - protein, 107 aa, Artificial Sequence
  Synthetic peptide
DIQMTQSPSSLSASVGDRVTITCRASQDIRDDLGWYQQKPGNAPKRLIYGASTLQSGVPSRFSGSGSGTEFTLTISSLQPEDFATYYCLQHNSYPLTFGCGTKVDIK

SEQ ID NO: 375 - protein, 247 aa, Artificial Sequence
  Synthetic peptide
QVTLKESGPALVKPTETLTLTCTLSGFSLNNAKMGVSWIRQPPGKCLEWLAHIFSNDEKSYSTSLKSRLTISKDTSKGQVVLTMTNMDPVDTATYYCARIVGYGSGWYGYFDYWGQGTLVTVSSGGGGSGGGGSGGGGSDIQMTQSPSSLSASVGDRVTITCRASQDIRDDLGWYQQKPGNAPKRLIYGASTLQSGVPSRFSGSGSGTEFTLTISSLQPEDFATYYCLQHNSYPLTFGCGTKVDIKS

SEQ ID NO: 376 - protein, 501 aa, Artificial Sequence
  Synthetic peptide
QVTLKESGPALVKPTETLTLTCTLSGFSLNNAKMGVSWIRQPPGKCLEWLAHIFSNDEKSYSTSLKSRLTISKDTSKGQVVLTMTNMDPVDTATYYCARIVGYGSGWYGYFDYWGQGTLVTVSSGGGGSGGGGSGGGGSDIQMTQSPSSLSASVGDRVTITCRASQDIRDDLGWYQQKPGNAPKRLIYGASTLQSGVPSRFSGSGSGTEFTLTISSLQPEDFATYYCLQHNSYPLTFGCGTKVDIKSGGGGSEVQLVESGGGLVQPGGSLKLSCAASGFTFNKYAMNWVRQAPGKGLEWVARIRSKYNNYATYYADSVKDRFTISRDDSKNTAYLQMNNLKTEDTAVYYCVRHGNFGNSYISYWAYWGQGTLVTVSSGGGGSGGGGSGGGGSQTVVTQEPSLTVSPGGTVTLTCGSSTGAVTSGNYPNWVQQKPGQAPRGLIGGTKFLAPGTPARFSGSLLGGKAALTLSGVQPEDEAEYYCVLWYSNRWVFGGGTKLTVL

SEQ ID NO: 377 - protein, 989 aa, Artificial Sequence
  Synthetic peptide
QVTLKESGPALVKPTETLTLTCTLSGFSLNNAKMGVSWIRQPPGKCLEWLAHIFSNDEKSYSTSLKSRLTISKDTSKGQVVLTMTNMDPVDTATYYCARIVGYGSGWYGYFDYWGQGTLVTVSSGGGGSGGGGSGGGGSDIQMTQSPSSLSASVGDRVTITCRASQDIRDDLGWYQQKPGNAPKRLIYGASTLQSGVPSRFSGSGSGTEFTLTISSLQPEDFATYYCLQHNSYPLTFGCGTKVDIKSGGGGSEVQLVESGGGLVQPGGSLKLSCAASGFTFNKYAMNWVRQAPGKGLEWVARIRSKYNNYATYYADSVKDRFTISRDDSKNTAYLQMNNLKTEDTAVYYCVRHGNFGNSYISYWAYWGQGTLVTVSSGGGGSGGGGSGGGGSQTVVTQEPSLTVSPGGTVTLTCGSSTGAVTSGNYPNWVQQKPGQAPRGLIGGTKFLAPGTPARFSGSLLGGKAALTLSGVQPEDEAEYYCVLWYSNRWVFGGGTKLTVLGGGGDKTHTCPPCPAPELLGGPSVFLFPPKPKDTLMISRTPEVTCVVVDVSHEDPEVKFNWYVDGVEVHNAKTKPCEEQYGSTYRCVSVLTVLHQDWLNGKEYKCKVSNKALPAPIEKTISKAKGQPREPQVYTLPPSREEMTKNQVSLTCLVKGFYPSDIAVEWESNGQPENNYKTTPPVLDSDGSFFLYSKLTVDKSRWQQGNVFSCSVMHEALHNHYTQKSLSLSPGKGGGGSGGGGSGGGGSGGGGSGGGGSGGGGSDKTHTCPPCPAPELLGGPSVFLFPPKPKDTLMISRTPEVTCVVVDVSHEDPEVKFNWYVDGVEVHNAKTKPCEEQYGSTYRCVSVLTVLHQDWLNGKEYKCKVSNKALPAPIEKTISKAKGQPREPQVYTLPPSREEMTKNQVSLTCLVKGFYPSDIAVEWESNGQPENNYKTTPPVLDSDGSFFLYSKLTVDKSRWQQGNVFSCSVMHEALHNHYTQKSLSLSPGK

SEQ ID NO: 378 - protein, 7 aa, Artificial Sequence
  Synthetic peptide
NARMAVS

SEQ ID NO: 379 - protein, 16 aa, Artificial Sequence
  Synthetic peptide
HIFSNDEKSYSTSLKS

SEQ ID NO: 380 - protein, 14 aa, Artificial Sequence
  Synthetic peptide
IVGYGSGWYGYFDY

SEQ ID NO: 381 - protein, 11 aa, Artificial Sequence
  Synthetic peptide
RASQDIRYDLA

SEQ ID NO: 382 - protein, 7 aa, Artificial Sequence
  Synthetic peptide
AASSLQS

SEQ ID NO: 383 - protein, 9 aa, Artificial Sequence
  Synthetic peptide
LQHNFYPLT

SEQ ID NO: 384 - protein, 124 aa, Artificial Sequence
  Synthetic peptide
QVTLKESGPVLVKPTETLTLTCTVSGFSLRNARMAVSWIRQPPGKTLEWLAHIFSNDEKSYSTSLKSRLTISKDTSKSQVVLTMTNMDPVDTATYYCARIVGYGSGWYGYFDYWGQGTLVTVSS

SEQ ID NO: 385 - protein, 107 aa, Artificial Sequence
  Synthetic peptide
DIQMTQSPSSVSASVGDRVTITCRASQDIRYDLAWYQQKPGKAPKRLIYAASSLQSGVPSRFSGSGSGTEFTLTISSLQPEDFATYYCLQHNFYPLTFGGGTKVEIK

SEQ ID NO: 386 - protein, 247 aa, Artificial Sequence
  Synthetic peptide
QVTLKESGPVLVKPTETLTLTCTVSGFSLRNARMAVSWIRQPPGKTLEWLAHIFSNDEKSYSTSLKSRLTISKDTSKSQVVLTMTNMDPVDTATYYCARIVGYGSGWYGYFDYWGQGTLVTVSSGGGGSGGGGSGGGGSDIQMTQSPSSVSASVGDRVTITCRASQDIRYDLAWYQQKPGKAPKRLIYAASSLQSGVPSRFSGSGSGTEFTLTISSLQPEDFATYYCLQHNFYPLTFGGGTKVEIKS

SEQ ID NO: 387 - protein, 501 aa, Artificial Sequence
  Synthetic peptide
QVTLKESGPVLVKPTETLTLTCTVSGFSLRNARMAVSWIRQPPGKTLEWLAHIFSNDEKSYSTSLKSRLTISKDTSKSQVVLTMTNMDPVDTATYYCARIVGYGSGWYGYFDYWGQGTLVTVSSGGGGSGGGGSGGGGSDIQMTQSPSSVSASVGDRVTITCRASQDIRYDLAWYQQKPGKAPKRLIYAASSLQSGVPSRFSGSGSGTEFTLTISSLQPEDFATYYCLQHNFYPLTFGGGTKVEIKSGGGGSEVQLVESGGGLVQPGGSLKLSCAASGFTFNKYAMNWVRQAPGKGLEWVARIRSKYNNYATYYADSVKDRFTISRDDSKNTAYLQMNNLKTEDTAVYYCVRHGNFGNSYISYWAYWGQGTLVTVSSGGGGSGGGGSGGGGSQTVVTQEPSLTVSPGGTVTLTCGSSTGAVTSGNYPNWVQQKPGQAPRGLIGGTKFLAPGTPARFSGSLLGGKAALTLSGVQPEDEAEYYCVLWYSNRWVFGGGTKLTVL

SEQ ID NO: 388 - protein, 989 aa, Artificial Sequence
  Synthetic peptide
QVTLKESGPVLVKPTETLTLTCTVSGFSLRNARMAVSWIRQPPGKTLEWLAHIFSNDEKSYSTSLKSRLTISKDTSKSQVVLTMTNMDPVDTATYYCARIVGYGSGWYGYFDYWGQGTLVTVSSGGGGSGGGGSGGGGSDIQMTQSPSSVSASVGDRVTITCRASQDIRYDLAWYQQKPGKAPKRLIYAASSLQSGVPSRFSGSGSGTEFTLTISSLQPEDFATYYCLQHNFYPLTFGGGTKVEIKSGGGGSEVQLVESGGGLVQPGGSLKLSCAASGFTFNKYAMNWVRQAPGKGLEWVARIRSKYNNYATYYADSVKDRFTISRDDSKNTAYLQMNNLKTEDTAVYYCVRHGNFGNSYISYWAYWGQGTLVTVSSGGGGSGGGGSGGGGSQTVVTQEPSLTVSPGGTVTLTCGSSTGAVTSGNYPNWVQQKPGQAPRGLIGGTKFLAPGTPARFSGSLLGGKAALTLSGVQPEDEAEYYCVLWYSNRWVFGGGTKLTVLGGGGDKTHTCPPCPAPELLGGPSVFLFPPKPKDTLMISRTPEVTCVVVDVSHEDPEVKFNWYVDGVEVHNAKTKPCEEQYGSTYRCVSVLTVLHQDWLNGKEYKCKVSNKALPAPIEKTISKAKGQPREPQVYTLPPSREEMTKNQVSLTCLVKGFYPSDIAVEWESNGQPENNYKTTPPVLDSDGSFFLYSKLTVDKSRWQQGNVFSCSVMHEALHNHYTQKSLSLSPGKGGGGSGGGGSGGGGSGGGGSGGGGSGGGGSDKTHTCPPCPAPELLGGPSVFLFPPKPKDTLMISRTPEVTCVVVDVSHEDPEVKFNWYVDGVEVHNAKTKPCEEQYGSTYRCVSVLTVLHQDWLNGKEYKCKVSNKALPAPIEKTISKAKGQPREPQVYTLPPSREEMTKNQVSLTCLVKGFYPSDIAVEWESNGQPENNYKTTPPVLDSDGSFFLYSKLTVDKSRWQQGNVFSCSVMHEALHNHYTQKSLSLSPGK

SEQ ID NO: 389 - protein, 124 aa, Artificial Sequence
  Synthetic peptide
QVTLKESGPVLVKPTETLTLTCTVSGFSLRNARMAVSWIRQPPGKCLEWLAHIFSNDEKSYSTSLKSRLTISKDTSKSQVVLTMTNMDPVDTATYYCARIVGYGSGWYGYFDYWGQGTLVTVSS

SEQ ID NO: 390 - protein, 107 aa, Artificial Sequence
  Synthetic peptide
DIQMTQSPSSVSASVGDRVTITCRASQDIRYDLAWYQQKPGKAPKRLIYAASSLQSGVPSRFSGSGSGTEFTLTISSLQPEDFATYYCLQHNFYPLTFGCGTKVEIK

SEQ ID NO: 391 - protein, 247 aa, Artificial Sequence
  Synthetic peptide
QVTLKESGPVLVKPTETLTLTCTVSGFSLRNARMAVSWIRQPPGKCLEWLAHIFSNDEKSYSTSLKSRLTISKDTSKSQVVLTMTNMDPVDTATYYCARIVGYGSGWYGYFDYWGQGTLVTVSSGGGGSGGGGSGGGGSDIQMTQSPSSVSASVGDRVTITCRASQDIRYDLAWYQQKPGKAPKRLIYAASSLQSGVPSRFSGSGSGTEFTLTISSLQPEDFATYYCLQHNFYPLTFGCGTKVEIKS

SEQ ID NO: 392 - protein, 501 aa, Artificial Sequence
  Synthetic peptide
QVTLKESGPVLVKPTETLTLTCTVSGFSLRNARMAVSWIRQPPGKCLEWLAHIFSNDEKSYSTSLKSRLTISKDTSKSQVVLTMTNMDPVDTATYYCARIVGYGSGWYGYFDYWGQGTLVTVSSGGGGSGGGGSGGGGSDIQMTQSPSSVSASVGDRVTITCRASQDIRYDLAWYQQKPGKAPKRLIYAASSLQSGVPSRFSGSGSGTEFTLTISSLQPEDFATYYCLQHNFYPLTFGCGTKVEIKSGGGGSEVQLVESGGGLVQPGGSLKLSCAASGFTFNKYAMNWVRQAPGKGLEWVARIRSKYNNYATYYADSVKDRFTISRDDSKNTAYLQMNNLKTEDTAVYYCVRHGNFGNSYISYWAYWGQGTLVTVSSGGGGSGGGGSGGGGSQTVVTQEPSLTVSPGGTVTLTCGSSTGAVTSGNYPNWVQQKPGQAPRGLIGGTKFLAPGTPARFSGSLLGGKAALTLSGVQPEDEAEYYCVLWYSNRWVFGGGTKLTVL

SEQ ID NO: 393 - protein, 989 aa, Artificial Sequence
  Synthetic peptide
QVTLKESGPVLVKPTETLTLTCTVSGFSLRNARMAVSWIRQPPGKCLEWLAHIFSNDEKSYSTSLKSRLTISKDTSKSQVVLTMTNMDPVDTATYYCARIVGYGSGWYGYFDYWGQGTLVTVSSGGGGSGGGGSGGGGSDIQMTQSPSSVSASVGDRVTITCRASQDIRYDLAWYQQKPGKAPKRLIYAASSLQSGVPSRFSGSGSGTEFTLTISSLQPEDFATYYCLQHNFYPLTFGCGTKVEIKSGGGGSEVQLVESGGGLVQPGGSLKLSCAASGFTFNKYAMNWVRQAPGKGLEWVARIRSKYNNYATYYADSVKDRFTISRDDSKNTAYLQMNNLKTEDTAVYYCVRHGNFGNSYISYWAYWGQGTLVTVSSGGGGSGGGGSGGGGSQTVVTQEPSLTVSPGGTVTLTCGSSTGAVTSGNYPNWVQQKPGQAPRGLIGGTKFLAPGTPARFSGSLLGGKAALTLSGVQPEDEAEYYCVLWYSNRWVFGGGTKLTVLGGGGDKTHTCPPCPAPELLGGPSVFLFPPKPKDTLMISRTPEVTCVVVDVSHEDPEVKFNWYVDGVEVHNAKTKPCEEQYGSTYRCVSVLTVLHQDWLNGKEYKCKVSNKALPAPIEKTISKAKGQPREPQVYTLPPSREEMTKNQVSLTCLVKGFYPSDIAVEWESNGQPENNYKTTPPVLDSDGSFFLYSKLTVDKSRWQQGNVFSCSVMHEALHNHYTQKSLSLSPGKGGGGSGGGGSGGGGSGGGGSGGGGSGGGGSDKTHTCPPCPAPELLGGPSVFLFPPKPKDTLMISRTPEVTCVVVDVSHEDPEVKFNWYVDGVEVHNAKTKPCEEQYGSTYRCVSVLTVLHQDWLNGKEYKCKVSNKALPAPIEKTISKAKGQPREPQVYTLPPSREEMTKNQVSLTCLVKGFYPSDIAVEWESNGQPENNYKTTPPVLDSDGSFFLYSKLTVDKSRWQQGNVFSCSVMHEALHNHYTQKSLSLSPGK

SEQ ID NO: 394 - protein, 7 aa, Artificial Sequence
  Synthetic peptide
NARMGVS

SEQ ID NO: 395 - protein, 16 aa, Artificial Sequence
  Synthetic peptide
HIFSNDEKSFSTSLKN

SEQ ID NO: 396 - protein, 14 aa, Artificial Sequence
  Synthetic peptide
MVGYGSGWYAYFDY

SEQ ID NO: 397 - protein, 11 aa, Artificial Sequence
  Synthetic peptide
RASQSISSYLN

SEQ ID NO: 398 - protein, 7 aa, Artificial Sequence
  Synthetic peptide
AASSLQS

SEQ ID NO: 399 - protein, 9 aa, Artificial Sequence
  Synthetic peptide
LQHNSYPLT

SEQ ID NO: 400 - protein, 124 aa, Artificial Sequence
  Synthetic peptide
QVTLKESGPVLVKPTQTLTLTCTFSGFSLSNARMGVSWIRQPPGKALEWLAHIFSNDEKSFSTSLKNRLTISKDTSKSQVVLTMTNMDPVDTATYYCARMVGYGSGWYAYFDYWGQGTQVTVSS

SEQ ID NO: 401 - protein, 107 aa, Artificial Sequence
  Synthetic peptide
DIQMTQSPSSLSASVGDRVTITCRASQSISSYLNWYQQKPGKAPKLLIYAASSLQSGVPSRFSGSGSGTDFTLTISSLQPEDFATYYCLQHNSYPLTFGGGTKVEIK

SEQ ID NO: 402 - protein, 247 aa, Artificial Sequence
  Synthetic peptide
QVTLKESGPVLVKPTQTLTLTCTFSGFSLSNARMGVSWIRQPPGKALEWLAHIFSNDEKSFSTSLKNRLTISKDTSKSQVVLTMTNMDPVDTATYYCARMVGYGSGWYAYFDYWGQGTQVTVSSGGGGSGGGGSGGGGSDIQMTQSPSSLSASVGDRVTITCRASQSISSYLNWYQQKPGKAPKLLIYAASSLQSGVPSRFSGSGSGTDFTLTISSLQPEDFATYYCLQHNSYPLTFGGGTKVEIKS

SEQ ID NO: 403 - protein, 501 aa, Artificial Sequence
  Synthetic peptide
QVTLKESGPVLVKPTQTLTLTCTFSGFSLSNARMGVSWIRQPPGKALEWLAHIFSNDEKSFSTSLKNRLTISKDTSKSQVVLTMTNMDPVDTATYYCARMVGYGSGWYAYFDYWGQGTQVTVSSGGGGSGGGGSGGGGSDIQMTQSPSSLSASVGDRVTITCRASQSISSYLNWYQQKPGKAPKLLIYAASSLQSGVPSRFSGSGSGTDFTLTISSLQPEDFATYYCLQHNSYPLTFGGGTKVEIKSGGGGSEVQLVESGGGLVQPGGSLKLSCAASGFTFNKYAMNWVRQAPGKGLEWVARIRSKYNNYATYYADSVKDRFTISRDDSKNTAYLQMNNLKTEDTAVYYCVRHGNFGNSYISYWAYWGQGTLVTVSSGGGGSGGGGSGGGGSQTVVTQEPSLTVSPGGTVTLTCGSSTGAVTSGNYPNWVQQKPGQAPRGLIGGTKFLAPGTPARFSGSLLGGKAALTLSGVQPEDEAEYYCVLWYSNRWVFGGGTKLTVL

SEQ ID NO: 404 - protein, 989 aa, Artificial Sequence
  Synthetic peptide
QVTLKESGPVLVKPTQTLTLTCTFSGFSLSNARMGVSWIRQPPGKALEWLAHIFSNDEKSFSTSLKNRLTISKDTSKSQVVLTMTNMDPVDTATYYCARMVGYGSGWYAYFDYWGQGTQVTVSSGGGGSGGGGSGGGGSDIQMTQSPSSLSASVGDRVTITCRASQSISSYLNWYQQKPGKAPKLLIYAASSLQSGVPSRFSGSGSGTDFTLTISSLQPEDFATYYCLQHNSYPLTFGGGTKVEIKSGGGGSEVQLVESGGGLVQPGGSLKLSCAASGFTFNKYAMNWVRQAPGKGLEWVARIRSKYNNYATYYADSVKDRFTISRDDSKNTAYLQMNNLKTEDTAVYYCVRHGNFGNSYISYWAYWGQGTLVTVSSGGGGSGGGGSGGGGSQTVVTQEPSLTVSPGGTVTLTCGSSTGAVTSGNYPNWVQQKPGQAPRGLIGGTKFLAPGTPARFSGSLLGGKAALTLSGVQPEDEAEYYCVLWYSNRWVFGGGTKLTVLGGGGDKTHTCPPCPAPELLGGPSVFLFPPKPKDTLMISRTPEVTCVVVDVSHEDPEVKFNWYVDGVEVHNAKTKPCEEQYGSTYRCVSVLTVLHQDWLNGKEYKCKVSNKALPAPIEKTISKAKGQPREPQVYTLPPSREEMTKNQVSLTCLVKGFYPSDIAVEWESNGQPENNYKTTPPVLDSDGSFFLYSKLTVDKSRWQQGNVFSCSVMHEALHNHYTQKSLSLSPGKGGGGSGGGGSGGGGSGGGGSGGGGSGGGGSDKTHTCPPCPAPELLGGPSVFLFPPKPKDTLMISRTPEVTCVVVDVSHEDPEVKFNWYVDGVEVHNAKTKPCEEQYGSTYRCVSVLTVLHQDWLNGKEYKCKVSNKALPAPIEKTISKAKGQPREPQVYTLPPSREEMTKNQVSLTCLVKGFYPSDIAVEWESNGQPENNYKTTPPVLDSDGSFFLYSKLTVDKSRWQQGNVFSCSVMHEALHNHYTQKSLSLSPGK

SEQ ID NO: 405 - protein, 124 aa, Artificial Sequence
  Synthetic peptide
QVTLKESGPVLVKPTQTLTLTCTFSGFSLSNARMGVSWIRQPPGKCLEWLAHIFSNDEKSFSTSLKNRLTISKDTSKSQVVLTMTNMDPVDTATYYCARMVGYGSGWYAYFDYWGQGTQVTVSS

SEQ ID NO: 406 - protein, 107 aa, Artificial Sequence
  Synthetic peptide
DIQMTQSPSSLSASVGDRVTITCRASQSISSYLNWYQQKPGKAPKLLIYAASSLQSGVPSRFSGSGSGTDFTLTISSLQPEDFATYYCLQHNSYPLTFGCGTKVEIK

SEQ ID NO: 407 - protein, 247 aa, Artificial Sequence
  Synthetic peptide
QVTLKESGPVLVKPTQTLTLTCTFSGFSLSNARMGVSWIRQPPGKCLEWLAHIFSNDEKSFSTSLKNRLTISKDTSKSQVVLTMTNMDPVDTATYYCARMVGYGSGWYAYFDYWGQGTQVTVSSGGGGSGGGGSGGGGSDIQMTQSPSSLSASVGDRVTITCRASQSISSYLNWYQQKPGKAPKLLIYAASSLQSGVPSRFSGSGSGTDFTLTISSLQPEDFATYYCLQHNSYPLTFGCGTKVEIKS

SEQ ID NO: 408 - protein, 501 aa, Artificial Sequence
  Synthetic peptide
QVTLKESGPVLVKPTQTLTLTCTFSGFSLSNARMGVSWIRQPPGKCLEWLAHIFSNDEKSFSTSLKNRLTISKDTSKSQVVLTMTNMDPVDTATYYCARMVGYGSGWYAYFDYWGQGTQVTVSSGGGGSGGGGSGGGGSDIQMTQSPSSLSASVGDRVTITCRASQSISSYLNWYQQKPGKAPKLLIYAASSLQSGVPSRFSGSGSGTDFTLTISSLQPEDFATYYCLQHNSYPLTFGCGTKVEIKSGGGGSEVQLVESGGGLVQPGGSLKLSCAASGFTFNKYAMNWVRQAPGKGLEWVARIRSKYNNYATYYADSVKDRFTISRDDSKNTAYLQMNNLKTEDTAVYYCVRHGNFGNSYISYWAYWGQGTLVTVSSGGGGSGGGGSGGGGSQTVVTQEPSLTVSPGGTVTLTCGSSTGAVTSGNYPNWVQQKPGQAPRGLIGGTKFLAPGTPARFSGSLLGGKAALTLSGVQPEDEAEYYCVLWYSNRWVFGGGTKLTVL

SEQ ID NO: 409 - protein, 989 aa, Artificial Sequence
  Synthetic peptide
QVTLKESGPVLVKPTQTLTLTCTFSGFSLSNARMGVSWIRQPPGKCLEWLAHIFSNDEKSFSTSLKNRLTISKDTSKSQVVLTMTNMDPVDTATYYCARMVGYGSGWYAYFDYWGQGTQVTVSSGGGGSGGGGSGGGGSDIQMTQSPSSLSASVGDRVTITCRASQSISSYLNWYQQKPGKAPKLLIYAASSLQSGVPSRFSGSGSGTDFTLTISSLQPEDFATYYCLQHNSYPLTFGCGTKVEIKSGGGGSEVQLVESGGGLVQPGGSLKLSCAASGFTFNKYAMNWVRQAPGKGLEWVARIRSKYNNYATYYADSVKDRFTISRDDSKNTAYLQMNNLKTEDTAVYYCVRHGNFGNSYISYWAYWGQGTLVTVSSGGGGSGGGGSGGGGSQTVVTQEPSLTVSPGGTVTLTCGSSTGAVTSGNYPNWVQQKPGQAPRGLIGGTKFLAPGTPARFSGSLLGGKAALTLSGVQPEDEAEYYCVLWYSNRWVFGGGTKLTVLGGGGDKTHTCPPCPAPELLGGPSVFLFPPKPKDTLMISRTPEVTCVVVDVSHEDPEVKFNWYVDGVEVHNAKTKPCEEQYGSTYRCVSVLTVLHQDWLNGKEYKCKVSNKALPAPIEKTISKAKGQPREPQVYTLPPSREEMTKNQVSLTCLVKGFYPSDIAVEWESNGQPENNYKTTPPVLDSDGSFFLYSKLTVDKSRWQQGNVFSCSVMHEALHNHYTQKSLSLSPGKGGGGSGGGGSGGGGSGGGGSGGGGSGGGGSDKTHTCPPCPAPELLGGPSVFLFPPKPKDTLMISRTPEVTCVVVDVSHEDPEVKFNWYVDGVEVHNAKTKPCEEQYGSTYRCVSVLTVLHQDWLNGKEYKCKVSNKALPAPIEKTISKAKGQPREPQVYTLPPSREEMTKNQVSLTCLVKGFYPSDIAVEWESNGQPENNYKTTPPVLDSDGSFFLYSKLTVDKSRWQQGNVFSCSVMHEALHNHYTQKSLSLSPGK

SEQ ID NO: 410 - protein, 7 aa, Artificial Sequence
  Synthetic peptide
NARMGVS

SEQ ID NO: 411 - protein, 16 aa, Artificial Sequence
  Synthetic peptide
HIFSNDEKSYSTSLKN

SEQ ID NO: 412 - protein, 14 aa, Artificial Sequence
  Synthetic peptide
IVGYGTGWFGYFDY

SEQ ID NO: 413 - protein, 11 aa, Artificial Sequence
  Synthetic peptide
RASQDIRTDLA

SEQ ID NO: 414 - protein, 7 aa, Artificial Sequence
  Synthetic peptide
AASSLQS

SEQ ID NO: 415 - protein, 9 aa, Artificial Sequence
  Synthetic peptide
LQHNRYPLT

SEQ ID NO: 416 - protein, 124 aa, Artificial Sequence
  Synthetic peptide
QVTLKESGPTLVKPTETLTLTCTVSGFSLNNARMGVSWIRQPPGKALEWLAHIFSNDEKSYSTSLKNRLTISKDSSKTQVVLTMTNVDPVDTATYYCARIVGYGTGWFGYFDYWGQGTQVTVSS

SEQ ID NO: 417 - protein, 107 aa, Artificial Sequence
  Synthetic peptide
DIQMTQSPSSLSASVGDRVTITCRASQDIRTDLAWYQQKPGKAPKRLIYAASSLQSGVPSRFSGSGSGTEFTLTISSLQPEDFATYYCLQHNRYPLTFGGGTKVDIK

SEQ ID NO: 418 - protein, 247 aa, Artificial Sequence
  Synthetic peptide
QVTLKESGPTLVKPTETLTLTCTVSGFSLNNARMGVSWIRQPPGKALEWLAHIFSNDEKSYSTSLKNRLTISKDSSKTQVVLTMTNVDPVDTATYYCARIVGYGTGWFGYFDYWGQGTQVTVSSGGGGSGGGGSGGGGSDIQMTQSPSSLSASVGDRVTITCRASQDIRTDLAWYQQKPGKAPKRLIYAASSLQSGVPSRFSGSGSGTEFTLTISSLQPEDFATYYCLQHNRYPLTFGGGTKVDIKS

SEQ ID NO: 419 - protein, 501 aa, Artificial Sequence
  Synthetic peptide
QVTLKESGPTLVKPTETLTLTCTVSGFSLNNARMGVSWIRQPPGKALEWLAHIFSNDEKSYSTSLKNRLTISKDSSKTQVVLTMTNVDPVDTATYYCARIVGYGTGWFGYFDYWGQGTQVTVSSGGGGSGGGGSGGGGSDIQMTQSPSSLSASVGDRVTITCRASQDIRTDLAWYQQKPGKAPKRLIYAASSLQSGVPSRFSGSGSGTEFTLTISSLQPEDFATYYCLQHNRYPLTFGGGTKVDIKSGGGGSEVQLVESGGGLVQPGGSLKLSCAASGFTFNKYAMNWVRQAPGKGLEWVARIRSKYNNYATYYADSVKDRFTISRDDSKNTAYLQMNNLKTEDTAVYYCVRHGNFGNSYISYWAYWGQGTLVTVSSGGGGSGGGGSGGGGSQTVVTQEPSLTVSPGGTVTLTCGSSTGAVTSGNYPNWVQQKPGQAPRGLIGGTKFLAPGTPARFSGSLLGGKAALTLSGVQPEDEAEYYCVLWYSNRWVFGGGTKLTVL

SEQ ID NO: 420 - protein, 989 aa, Artificial Sequence
  Synthetic peptide
QVTLKESGPTLVKPTETLTLTCTVSGFSLNNARMGVSWIRQPPGKALEWLAHIFSNDEKSYSTSLKNRLTISKDSSKTQVVLTMTNVDPVDTATYYCARIVGYGTGWFGYFDYWGQGTQVTVSSGGGGSGGGGSGGGGSDIQMTQSPSSLSASVGDRVTITCRASQDIRTDLAWYQQKPGKAPKRLIYAASSLQSGVPSRFSGSGSGTEFTLTISSLQPEDFATYYCLQHNRYPLTFGGGTKVDIKSGGGGSEVQLVESGGGLVQPGGSLKLSCAASGFTFNKYAMNWVRQAPGKGLEWVARIRSKYNNYATYYADSVKDRFTISRDDSKNTAYLQMNNLKTEDTAVYYCVRHGNFGNSYISYWAYWGQGTLVTVSSGGGGSGGGGSGGGGSQTVVTQEPSLTVSPGGTVTLTCGSSTGAVTSGNYPNWVQQKPGQAPRGLIGGTKFLAPGTPARFSGSLLGGKAALTLSGVQPEDEAEYYCVLWYSNRWVFGGGTKLTVLGGGGDKTHTCPPCPAPELLGGPSVFLFPPKPKDTLMISRTPEVTCVVVDVSHEDPEVKFNWYVDGVEVHNAKTKPCEEQYGSTYRCVSVLTVLHQDWLNGKEYKCKVSNKALPAPIEKTISKAKGQPREPQVYTLPPSREEMTKNQVSLTCLVKGFYPSDIAVEWESNGQPENNYKTTPPVLDSDGSFFLYSKLTVDKSRWQQGNVFSCSVMHEALHNHYTQKSLSLSPGKGGGGSGGGGSGGGGSGGGGSGGGGSGGGGSDKTHTCPPCPAPELLGGPSVFLFPPKPKDTLMISRTPEVTCVVVDVSHEDPEVKFNWYVDGVEVHNAKTKPCEEQYGSTYRCVSVLTVLHQDWLNGKEYKCKVSNKALPAPIEKTISKAKGQPREPQVYTLPPSREEMTKNQVSLTCLVKGFYPSDIAVEWESNGQPENNYKTTPPVLDSDGSFFLYSKLTVDKSRWQQGNVFSCSVMHEALHNHYTQKSLSLSPGK

SEQ ID NO: 421 - protein, 124 aa, Artificial Sequence
  Synthetic peptide
QVTLKESGPTLVKPTETLTLTCTVSGFSLNNARMGVSWIRQPPGKCLEWLAHIFSNDEKSYSTSLKNRLTISKDSSKTQVVLTMTNVDPVDTATYYCARIVGYGTGWFGYFDYWGQGTQVTVSS

SEQ ID NO: 422 - protein, 107 aa, Artificial Sequence
  Synthetic peptide
DIQMTQSPSSLSASVGDRVTITCRASQDIRTDLAWYQQKPGKAPKRLIYAASSLQSGVPSRFSGSGSGTEFTLTISSLQPEDFATYYCLQHNRYPLTFGCGTKVDIK

SEQ ID NO: 423 - protein, 247 aa, Artificial Sequence
  Synthetic peptide
QVTLKESGPTLVKPTETLTLTCTVSGFSLNNARMGVSWIRQPPGKCLEWLAHIFSNDEKSYSTSLKNRLTISKDSSKTQVVLTMTNVDPVDTATYYCARIVGYGTGWFGYFDYWGQGTQVTVSSGGGGSGGGGSGGGGSDIQMTQSPSSLSASVGDRVTITCRASQDIRTDLAWYQQKPGKAPKRLIYAASSLQSGVPSRFSGSGSGTEFTLTISSLQPEDFATYYCLQHNRYPLTFGCGTKVDIKS

SEQ ID NO: 424 - protein, 501 aa, Artificial Sequence
  Synthetic peptide
QVTLKESGPTLVKPTETLTLTCTVSGFSLNNARMGVSWIRQPPGKCLEWLAHIFSNDEKSYSTSLKNRLTISKDSSKTQVVLTMTNVDPVDTATYYCARIVGYGTGWFGYFDYWGQGTQVTVSSGGGGSGGGGSGGGGSDIQMTQSPSSLSASVGDRVTITCRASQDIRTDLAWYQQKPGKAPKRLIYAASSLQSGVPSRFSGSGSGTEFTLTISSLQPEDFATYYCLQHNRYPLTFGCGTKVDIKSGGGGSEVQLVESGGGLVQPGGSLKLSCAASGFTFNKYAMNWVRQAPGKGLEWVARIRSKYNNYATYYADSVKDRFTISRDDSKNTAYLQMNNLKTEDTAVYYCVRHGNFGNSYISYWAYWGQGTLVTVSSGGGGSGGGGSGGGGSQTVVTQEPSLTVSPGGTVTLTCGSSTGAVTSGNYPNWVQQKPGQAPRGLIGGTKFLAPGTPARFSGSLLGGKAALTLSGVQPEDEAEYYCVLWYSNRWVFGGGTKLTVL

SEQ ID NO: 425 - protein, 989 aa, Artificial Sequence
  Synthetic peptide
QVTLKESGPTLVKPTETLTLTCTVSGFSLNNARMGVSWIRQPPGKCLEWLAHIFSNDEKSYSTSLKNRLTISKDSSKTQVVLTMTNVDPVDTATYYCARIVGYGTGWFGYFDYWGQGTQVTVSSGGGGSGGGGSGGGGSDIQMTQSPSSLSASVGDRVTITCRASQDIRTDLAWYQQKPGKAPKRLIYAASSLQSGVPSRFSGSGSGTEFTLTISSLQPEDFATYYCLQHNRYPLTFGCGTKVDIKSGGGGSEVQLVESGGGLVQPGGSLKLSCAASGFTFNKYAMNWVRQAPGKGLEWVARIRSKYNNYATYYADSVKDRFTISRDDSKNTAYLQMNNLKTEDTAVYYCVRHGNFGNSYISYWAYWGQGTLVTVSSGGGGSGGGGSGGGGSQTVVTQEPSLTVSPGGTVTLTCGSSTGAVTSGNYPNWVQQKPGQAPRGLIGGTKFLAPGTPARFSGSLLGGKAALTLSGVQPEDEAEYYCVLWYSNRWVFGGGTKLTVLGGGGDKTHTCPPCPAPELLGGPSVFLFPPKPKDTLMISRTPEVTCVVVDVSHEDPEVKFNWYVDGVEVHNAKTKPCEEQYGSTYRCVSVLTVLHQDWLNGKEYKCKVSNKALPAPIEKTISKAKGQPREPQVYTLPPSREEMTKNQVSLTCLVKGFYPSDIAVEWESNGQPENNYKTTPPVLDSDGSFFLYSKLTVDKSRWQQGNVFSCSVMHEALHNHYTQKSLSLSPGKGGGGSGGGGSGGGGSGGGGSGGGGSGGGGSDKTHTCPPCPAPELLGGPSVFLFPPKPKDTLMISRTPEVTCVVVDVSHEDPEVKFNWYVDGVEVHNAKTKPCEEQYGSTYRCVSVLTVLHQDWLNGKEYKCKVSNKALPAPIEKTISKAKGQPREPQVYTLPPSREEMTKNQVSLTCLVKGFYPSDIAVEWESNGQPENNYKTTPPVLDSDGSFFLYSKLTVDKSRWQQGNVFSCSVMHEALHNHYTQKSLSLSPGK

SEQ ID NO: 426 - protein, 7 aa, Artificial Sequence
  Synthetic peptide
NARMAVS

SEQ ID NO: 427 - protein, 16 aa, Artificial Sequence
  Synthetic peptide
HIFSNDEKSYSTSLKS

SEQ ID NO: 428 - protein, 14 aa, Artificial Sequence
  Synthetic peptide
IVGYGTGWYGFFDY

SEQ ID NO: 429 - protein, 11 aa, Artificial Sequence
  Synthetic peptide
RASQGIRNDLA

SEQ ID NO: 430 - protein, 7 aa, Artificial Sequence
  Synthetic peptide
AASSLQS

SEQ ID NO: 431 - protein, 9 aa, Artificial Sequence
  Synthetic peptide
LQHNSYPLT

SEQ ID NO: 432 - protein, 124 aa, Artificial Sequence
  Synthetic peptide
QVTLKESGPALVKPTETLTLTCTLSGFSLNNARMAVSWIRQPPGKTLEWLAHIFSNDEKSYSTSLKSRLTISKDTSKSQVVLTMTNMDPEDTATYYCARIVGYGTGWYGFFDYWGQGILVTVSS

SEQ ID NO: 433 - protein, 107 aa, Artificial Sequence
  Synthetic peptide
DIQMTQSPSSLSASVGDRVTITCRASQGIRNDLAWYQQKPGKAPKRLIYAASSLQSGVPSRFSGSGSGTEFTLTISSLQPEDFATYYCLQHNSYPLTFGGGTKVEIK

SEQ ID NO: 434 - protein, 247 aa, Artificial Sequence
  Synthetic peptide
QVTLKESGPALVKPTETLTLTCTLSGFSLNNARMAVSWIRQPPGKTLEWLAHIFSNDEKSYSTSLKSRLTISKDTSKSQVVLTMTNMDPEDTATYYCARIVGYGTGWYGFFDYWGQGILVTVSSGGGGSGGGGSGGGGSDIQMTQSPSSLSASVGDRVTITCRASQGIRNDLAWYQQKPGKAPKRLIYAASSLQSGVPSRFSGSGSGTEFTLTISSLQPEDFATYYCLQHNSYPLTFGGGTKVEIKS

SEQ ID NO: 435 - protein, 501 aa, Artificial Sequence
  Synthetic peptide
QVTLKESGPALVKPTETLTLTCTLSGFSLNNARMAVSWIRQPPGKTLEWLAHIFSNDEKSYSTSLKSRLTISKDTSKSQVVLTMTNMDPEDTATYYCARIVGYGTGWYGFFDYWGQGILVTVSSGGGGSGGGGSGGGGSDIQMTQSPSSLSASVGDRVTITCRASQGIRNDLAWYQQKPGKAPKRLIYAASSLQSGVPSRFSGSGSGTEFTLTISSLQPEDFATYYCLQHNSYPLTFGGGTKVEIKSGGGGSEVQLVESGGGLVQPGGSLKLSCAASGFTFNKYAMNWVRQAPGKGLEWVARIRSKYNNYATYYADSVKDRFTISRDDSKNTAYLQMNNLKTEDTAVYYCVRHGNFGNSYISYWAYWGQGTLVTVSSGGGGSGGGGSGGGGSQTVVTQEPSLTVSPGGTVTLTCGSSTGAVTSGNYPNWVQQKPGQAPRGLIGGTKFLAPGTPARFSGSLLGGKAALTLSGVQPEDEAEYYCVLWYSNRWVFGGGTKLTVL

SEQ ID NO: 436 - protein, 989 aa, Artificial Sequence
  Synthetic peptide
QVTLKESGPALVKPTETLTLTCTLSGFSLNNARMAVSWIRQPPGKTLEWLAHIFSNDEKSYSTSLKSRLTISKDTSKSQVVLTMTNMDPEDTATYYCARIVGYGTGWYGFFDYWGQGILVTVSSGGGGSGGGGSGGGGSDIQMTQSPSSLSASVGDRVTITCRASQGIRNDLAWYQQKPGKAPKRLIYAASSLQSGVPSRFSGSGSGTEFTLTISSLQPEDFATYYCLQHNSYPLTFGGGTKVEIKSGGGGSEVQLVESGGGLVQPGGSLKLSCAASGFTFNKYAMNWVRQAPGKGLEWVARIRSKYNNYATYYADSVKDRFTISRDDSKNTAYLQMNNLKTEDTAVYYCVRHGNFGNSYISYWAYWGQGTLVTVSSGGGGSGGGGSGGGGSQTVVTQEPSLTVSPGGTVTLTCGSSTGAVTSGNYPNWVQQKPGQAPRGLIGGTKFLAPGTPARFSGSLLGGKAALTLSGVQPEDEAEYYCVLWYSNRWVFGGGTKLTVLGGGGDKTHTCPPCPAPELLGGPSVFLFPPKPKDTLMISRTPEVTCVVVDVSHEDPEVKFNWYVDGVEVHNAKTKPCEEQYGSTYRCVSVLTVLHQDWLNGKEYKCKVSNKALPAPIEKTISKAKGQPREPQVYTLPPSREEMTKNQVSLTCLVKGFYPSDIAVEWESNGQPENNYKTTPPVLDSDGSFFLYSKLTVDKSRWQQGNVFSCSVMHEALHNHYTQKSLSLSPGKGGGGSGGGGSGGGGSGGGGSGGGGSGGGGSDKTHTCPPCPAPELLGGPSVFLFPPKPKDTLMISRTPEVTCVVVDVSHEDPEVKFNWYVDGVEVHNAKTKPCEEQYGSTYRCVSVLTVLHQDWLNGKEYKCKVSNKALPAPIEKTISKAKGQPREPQVYTLPPSREEMTKNQVSLTCLVKGFYPSDIAVEWESNGQPENNYKTTPPVLDSDGSFFLYSKLTVDKSRWQQGNVFSCSVMHEALHNHYTQKSLSLSPGK

SEQ ID NO: 437 - protein, 124 aa, Artificial Sequence
  Synthetic peptide
QVTLKESGPALVKPTETLTLTCTLSGFSLNNARMAVSWIRQPPGKCLEWLAHIFSNDEKSYSTSLKSRLTISKDTSKSQVVLTMTNMDPEDTATYYCARIVGYGTGWYGFFDYWGQGILVTVSS

SEQ ID NO: 438 - protein, 107 aa, Artificial Sequence
  Synthetic peptide
DIQMTQSPSSLSASVGDRVTITCRASQGIRNDLAWYQQKPGKAPKRLIYAASSLQSGVPSRFSGSGSGTEFTLTISSLQPEDFATYYCLQHNSYPLTFGCGTKVEIK

SEQ ID NO: 439 - protein, 247 aa, Artificial Sequence
  Synthetic peptide
QVTLKESGPALVKPTETLTLTCTLSGFSLNNARMAVSWIRQPPGKCLEWLAHIFSNDEKSYSTSLKSRLTISKDTSKSQVVLTMTNMDPEDTATYYCARIVGYGTGWYGFFDYWGQGILVTVSSGGGGSGGGGSGGGGSDIQMTQSPSSLSASVGDRVTITCRASQGIRNDLAWYQQKPGKAPKRLIYAASSLQSGVPSRFSGSGSGTEFTLTISSLQPEDFATYYCLQHNSYPLTFGCGTKVEIKS

SEQ ID NO: 440 - protein, 501 aa, Artificial Sequence
  Synthetic peptide
QVTLKESGPALVKPTETLTLTCTLSGFSLNNARMAVSWIRQPPGKCLEWLAHIFSNDEKSYSTSLKSRLTISKDTSKSQVVLTMTNMDPEDTATYYCARIVGYGTGWYGFFDYWGQGILVTVSSGGGGSGGGGSGGGGSDIQMTQSPSSLSASVGDRVTITCRASQGIRNDLAWYQQKPGKAPKRLIYAASSLQSGVPSRFSGSGSGTEFTLTISSLQPEDFATYYCLQHNSYPLTFGCGTKVEIKSGGGGSEVQLVESGGGLVQPGGSLKLSCAASGFTFNKYAMNWVRQAPGKGLEWVARIRSKYNNYATYYADSVKDRFTISRDDSKNTAYLQMNNLKTEDTAVYYCVRHGNFGNSYISYWAYWGQGTLVTVSSGGGGSGGGGSGGGGSQTVVTQEPSLTVSPGGTVTLTCGSSTGAVTSGNYPNWVQQKPGQAPRGLIGGTKFLAPGTPARFSGSLLGGKAALTLSGVQPEDEAEYYCVLWYSNRWVFGGGTKLTVL

SEQ ID NO: 441 - protein, 989 aa, Artificial Sequence
  Synthetic peptide
QVTLKESGPALVKPTETLTLTCTLSGFSLNNARMAVSWIRQPPGKCLEWLAHIFSNDEKSYSTSLKSRLTISKDTSKSQVVLTMTNMDPEDTATYYCARIVGYGTGWYGFFDYWGQGILVTVSSGGGGSGGGGSGGGGSDIQMTQSPSSLSASVGDRVTITCRASQGIRNDLAWYQQKPGKAPKRLIYAASSLQSGVPSRFSGSGSGTEFTLTISSLQPEDFATYYCLQHNSYPLTFGCGTKVEIKSGGGGSEVQLVESGGGLVQPGGSLKLSCAASGFTFNKYAMNWVRQAPGKGLEWVARIRSKYNNYATYYADSVKDRFTISRDDSKNTAYLQMNNLKTEDTAVYYCVRHGNFGNSYISYWAYWGQGTLVTVSSGGGGSGGGGSGGGGSQTVVTQEPSLTVSPGGTVTLTCGSSTGAVTSGNYPNWVQQKPGQAPRGLIGGTKFLAPGTPARFSGSLLGGKAALTLSGVQPEDEAEYYCVLWYSNRWVFGGGTKLTVLGGGGDKTHTCPPCPAPELLGGPSVFLFPPKPKDTLMISRTPEVTCVVVDVSHEDPEVKFNWYVDGVEVHNAKTKPCEEQYGSTYRCVSVLTVLHQDWLNGKEYKCKVSNKALPAPIEKTISKAKGQPREPQVYTLPPSREEMTKNQVSLTCLVKGFYPSDIAVEWESNGQPENNYKTTPPVLDSDGSFFLYSKLTVDKSRWQQGNVFSCSVMHEALHNHYTQKSLSLSPGKGGGGSGGGGSGGGGSGGGGSGGGGSGGGGSDKTHTCPPCPAPELLGGPSVFLFPPKPKDTLMISRTPEVTCVVVDVSHEDPEVKFNWYVDGVEVHNAKTKPCEEQYGSTYRCVSVLTVLHQDWLNGKEYKCKVSNKALPAPIEKTISKAKGQPREPQVYTLPPSREEMTKNQVSLTCLVKGFYPSDIAVEWESNGQPENNYKTTPPVLDSDGSFFLYSKLTVDKSRWQQGNVFSCSVMHEALHNHYTQKSLSLSPGK

SEQ ID NO: 442 - protein, 7 aa, Artificial Sequence
  Synthetic peptide
YARMGVS

SEQ ID NO: 443 - protein, 16 aa, Artificial Sequence
  Synthetic peptide
HIFSNDEKSYSTSLKS

SEQ ID NO: 444 - protein, 14 aa, Artificial Sequence
  Synthetic peptide
MPEYSSGWSGAFDI

SEQ ID NO: 445 - protein, 11 aa, Artificial Sequence
  Synthetic peptide
RASQDIRNDLA

SEQ ID NO: 446 - protein, 7 aa, Artificial Sequence
  Synthetic peptide
AASSLQS

SEQ ID NO: 447 - protein, 9 aa, Artificial Sequence
  Synthetic peptide
LQHNSYPLT

SEQ ID NO: 448 - protein, 124 aa, Artificial Sequence
  Synthetic peptide
QVTLKESGPTLVKPTETLTLTCTFSGFSLRYARMGVSWIRQPPGKALEWLAHIFSNDEKSYSTSLKSRLTISKDTSKSQVVLTLTNMDPVDTATYFCARMPEYSSGWSGAFDIWGQGTMVTVSS

SEQ ID NO: 449 - protein, 107 aa, Artificial Sequence
  Synthetic peptide
DIQMTQSPSSLSASVGDRVTITCRASQDIRNDLAWYQQKPGKAPKRLIYAASSLQSGVPSRFSGSGSGTEFTLTISSLQPEDFATYYCLQHNSYPLTFGGGTKLEIK

SEQ ID NO: 450 - protein, 247 aa, Artificial Sequence
  Synthetic peptide
QVTLKESGPTLVKPTETLTLTCTFSGFSLRYARMGVSWIRQPPGKALEWLAHIFSNDEKSYSTSLKSRLTISKDTSKSQVVLTLTNMDPVDTATYFCARMPEYSSGWSGAFDIWGQGTMVTVSSGGGGSGGGGSGGGGSDIQMTQSPSSLSASVGDRVTITCRASQDIRNDLAWYQQKPGKAPKRLIYAASSLQSGVPSRFSGSGSGTEFTLTISSLQPEDFATYYCLQHNSYPLTFGGGTKLEIKS

SEQ ID NO: 451 - protein, 501 aa, Artificial Sequence
  Synthetic peptide
QVTLKESGPTLVKPTETLTLTCTFSGFSLRYARMGVSWIRQPPGKALEWLAHIFSNDEKSYSTSLKSRLTISKDTSKSQVVLTLTNMDPVDTATYFCARMPEYSSGWSGAFDIWGQGTMVTVSSGGGGSGGGGSGGGGSDIQMTQSPSSLSASVGDRVTITCRASQDIRNDLAWYQQKPGKAPKRLIYAASSLQSGVPSRFSGSGSGTEFTLTISSLQPEDFATYYCLQHNSYPLTFGGGTKLEIKSGGGGSEVQLVESGGGLVQPGGSLKLSCAASGFTFNKYAMNWVRQAPGKGLEWVARIRSKYNNYATYYADSVKDRFTISRDDSKNTAYLQMNNLKTEDTAVYYCVRHGNFGNSYISYWAYWGQGTLVTVSSGGGGSGGGGSGGGGSQTVVTQEPSLTVSPGGTVTLTCGSSTGAVTSGNYPNWVQQKPGQAPRGLIGGTKFLAPGTPARFSGSLLGGKAALTLSGVQPEDEAEYYCVLWYSNRWVFGGGTKLTVL

SEQ ID NO: 452 - protein, 989 aa, Artificial Sequence
  Synthetic peptide
QVTLKESGPTLVKPTETLTLTCTFSGFSLRYARMGVSWIRQPPGKALEWLAHIFSNDEKSYSTSLKSRLTISKDTSKSQVVLTLTNMDPVDTATYFCARMPEYSSGWSGAFDIWGQGTMVTVSSGGGGSGGGGSGGGGSDIQMTQSPSSLSASVGDRVTITCRASQDIRNDLAWYQQKPGKAPKRLIYAASSLQSGVPSRFSGSGSGTEFTLTISSLQPEDFATYYCLQHNSYPLTFGGGTKLEIKSGGGGSEVQLVESGGGLVQPGGSLKLSCAASGFTFNKYAMNWVRQAPGKGLEWVARIRSKYNNYATYYADSVKDRFTISRDDSKNTAYLQMNNLKTEDTAVYYCVRHGNFGNSYISYWAYWGQGTLVTVSSGGGGSGGGGSGGGGSQTVVTQEPSLTVSPGGTVTLTCGSSTGAVTSGNYPNWVQQKPGQAPRGLIGGTKFLAPGTPARFSGSLLGGKAALTLSGVQPEDEAEYYCVLWYSNRWVFGGGTKLTVLGGGGDKTHTCPPCPAPELLGGPSVFLFPPKPKDTLMISRTPEVTCVVVDVSHEDPEVKFNWYVDGVEVHNAKTKPCEEQYGSTYRCVSVLTVLHQDWLNGKEYKCKVSNKALPAPIEKTISKAKGQPREPQVYTLPPSREEMTKNQVSLTCLVKGFYPSDIAVEWESNGQPENNYKTTPPVLDSDGSFFLYSKLTVDKSRWQQGNVFSCSVMHEALHNHYTQKSLSLSPGKGGGGSGGGGSGGGGSGGGGSGGGGSGGGGSDKTHTCPPCPAPELLGGPSVFLFPPKPKDTLMISRTPEVTCVVVDVSHEDPEVKFNWYVDGVEVHNAKTKPCEEQYGSTYRCVSVLTVLHQDWLNGKEYKCKVSNKALPAPIEKTISKAKGQPREPQVYTLPPSREEMTKNQVSLTCLVKGFYPSDIAVEWESNGQPENNYKTTPPVLDSDGSFFLYSKLTVDKSRWQQGNVFSCSVMHEALHNHYTQKSLSLSPGK

SEQ ID NO: 453 - protein, 124 aa, Artificial Sequence
  Synthetic peptide
QVTLKESGPTLVKPTETLTLTCTFSGFSLRYARMGVSWIRQPPGKCLEWLAHIFSNDEKSYSTSLKSRLTISKDTSKSQVVLTLTNMDPVDTATYFCARMPEYSSGWSGAFDIWGQGTMVTVSS

SEQ ID NO: 454 - protein, 107 aa, Artificial Sequence
  Synthetic peptide
DIQMTQSPSSLSASVGDRVTITCRASQDIRNDLAWYQQKPGKAPKRLIYAASSLQSGVPSRFSGSGSGTEFTLTISSLQPEDFATYYCLQHNSYPLTFGCGTKLEIK

SEQ ID NO: 455 - protein, 247 aa, Artificial Sequence
  Synthetic peptide
QVTLKESGPTLVKPTETLTLTCTFSGFSLRYARMGVSWIRQPPGKCLEWLAHIFSNDEKSYSTSLKSRLTISKDTSKSQVVLTLTNMDPVDTATYFCARMPEYSSGWSGAFDIWGQGTMVTVSSGGGGSGGGGSGGGGSDIQMTQSPSSLSASVGDRVTITCRASQDIRNDLAWYQQKPGKAPKRLIYAASSLQSGVPSRFSGSGSGTEFTLTISSLQPEDFATYYCLQHNSYPLTFGCGTKLEIKS

SEQ ID NO: 456 - protein, 501 aa, Artificial Sequence
  Synthetic peptide
QVTLKESGPTLVKPTETLTLTCTFSGFSLRYARMGVSWIRQPPGKCLEWLAHIFSNDEKSYSTSLKSRLTISKDTSKSQVVLTLTNMDPVDTATYFCARMPEYSSGWSGAFDIWGQGTMVTVSSGGGGSGGGGSGGGGSDIQMTQSPSSLSASVGDRVTITCRASQDIRNDLAWYQQKPGKAPKRLIYAASSLQSGVPSRFSGSGSGTEFTLTISSLQPEDFATYYCLQHNSYPLTFGCGTKLEIKSGGGGSEVQLVESGGGLVQPGGSLKLSCAASGFTFNKYAMNWVRQAPGKGLEWVARIRSKYNNYATYYADSVKDRFTISRDDSKNTAYLQMNNLKTEDTAVYYCVRHGNFGNSYISYWAYWGQGTLVTVSSGGGGSGGGGSGGGGSQTVVTQEPSLTVSPGGTVTLTCGSSTGAVTSGNYPNWVQQKPGQAPRGLIGGTKFLAPGTPARFSGSLLGGKAALTLSGVQPEDEAEYYCVLWYSNRWVFGGGTKLTVL

SEQ ID NO: 457 - protein, 989 aa, Artificial Sequence
  Synthetic peptide
QVTLKESGPTLVKPTETLTLTCTFSGFSLRYARMGVSWIRQPPGKCLEWLAHIFSNDEKSYSTSLKSRLTISKDTSKSQVVLTLTNMDPVDTATYFCARMPEYSSGWSGAFDIWGQGTMVTVSSGGGGSGGGGSGGGGSDIQMTQSPSSLSASVGDRVTITCRASQDIRNDLAWYQQKPGKAPKRLIYAASSLQSGVPSRFSGSGSGTEFTLTISSLQPEDFATYYCLQHNSYPLTFGCGTKLEIKSGGGGSEVQLVESGGGLVQPGGSLKLSCAASGFTFNKYAMNWVRQAPGKGLEWVARIRSKYNNYATYYADSVKDRFTISRDDSKNTAYLQMNNLKTEDTAVYYCVRHGNFGNSYISYWAYWGQGTLVTVSSGGGGSGGGGSGGGGSQTVVTQEPSLTVSPGGTVTLTCGSSTGAVTSGNYPNWVQQKPGQAPRGLIGGTKFLAPGTPARFSGSLLGGKAALTLSGVQPEDEAEYYCVLWYSNRWVFGGGTKLTVLGGGGDKTHTCPPCPAPELLGGPSVFLFPPKPKDTLMISRTPEVTCVVVDVSHEDPEVKFNWYVDGVEVHNAKTKPCEEQYGSTYRCVSVLTVLHQDWLNGKEYKCKVSNKALPAPIEKTISKAKGQPREPQVYTLPPSREEMTKNQVSLTCLVKGFYPSDIAVEWESNGQPENNYKTTPPVLDSDGSFFLYSKLTVDKSRWQQGNVFSCSVMHEALHNHYTQKSLSLSPGKGGGGSGGGGSGGGGSGGGGSGGGGSGGGGSDKTHTCPPCPAPELLGGPSVFLFPPKPKDTLMISRTPEVTCVVVDVSHEDPEVKFNWYVDGVEVHNAKTKPCEEQYGSTYRCVSVLTVLHQDWLNGKEYKCKVSNKALPAPIEKTISKAKGQPREPQVYTLPPSREEMTKNQVSLTCLVKGFYPSDIAVEWESNGQPENNYKTTPPVLDSDGSFFLYSKLTVDKSRWQQGNVFSCSVMHEALHNHYTQKSLSLSPGK

SEQ ID NO: 458 - protein, 7 aa, Artificial Sequence
  Synthetic peptide
NARMGVS

SEQ ID NO: 459 - protein, 16 aa, Artificial Sequence
  Synthetic peptide
HIFSNDEKSYSTSLKS

SEQ ID NO: 460 - protein, 14 aa, Artificial Sequence
  Synthetic peptide
MPEYSSGWSGAFDI

SEQ ID NO: 461 - protein, 11 aa, Artificial Sequence
  Synthetic peptide
RASQDIRDDLG

SEQ ID NO: 462 - protein, 7 aa, Artificial Sequence
  Synthetic peptide
GASTLQS

SEQ ID NO: 463 - protein, 9 aa, Artificial Sequence
  Synthetic peptide
LQHNSYPLT

SEQ ID NO: 464 - protein, 124 aa, Artificial Sequence
  Synthetic peptide
QVTLKESGPVLVKPTETLTLTCTVSGFSFRNARMGVSWIRQPPGKALEWLAHIFSNDEKSYSTSLKSRLTISKDTSKSQVVLTLTNMDPVDTATYFCARMPEYSSGWSGAFDIWGQGTMVTVSS

SEQ ID NO: 465 - protein, 107 aa, Artificial Sequence; identical to SEQ ID NO: 369
  Synthetic peptide

SEQ ID NO: 466 - protein, 247 aa, Artificial Sequence
  Synthetic peptide
QVTLKESGPVLVKPTETLTLTCTVSGFSFRNARMGVSWIRQPPGKALEWLAHIFSNDEKSYSTSLKSRLTISKDTSKSQVVLTLTNMDPVDTATYFCARMPEYSSGWSGAFDIWGQGTMVTVSSGGGGSGGGGSGGGGSDIQMTQSPSSLSASVGDRVTITCRASQDIRDDLGWYQQKPGNAPKRLIYGASTLQSGVPSRFSGSGSGTEFTLTISSLQPEDFATYYCLQHNSYPLTFGGGTKVDIKS

SEQ ID NO: 467 - protein, 501 aa, Artificial Sequence
  Synthetic peptide
QVTLKESGPVLVKPTETLTLTCTVSGFSFRNARMGVSWIRQPPGKALEWLAHIFSNDEKSYSTSLKSRLTISKDTSKSQVVLTLTNMDPVDTATYFCARMPEYSSGWSGAFDIWGQGTMVTVSSGGGGSGGGGSGGGGSDIQMTQSPSSLSASVGDRVTITCRASQDIRDDLGWYQQKPGNAPKRLIYGASTLQSGVPSRFSGSGSGTEFTLTISSLQPEDFATYYCLQHNSYPLTFGGGTKVDIKSGGGGSEVQLVESGGGLVQPGGSLKLSCAASGFTFNKYAMNWVRQAPGKGLEWVARIRSKYNNYATYYADSVKDRFTISRDDSKNTAYLQMNNLKTEDTAVYYCVRHGNFGNSYISYWAYWGQGTLVTVSSGGGGSGGGGSGGGGSQTVVTQEPSLTVSPGGTVTLTCGSSTGAVTSGNYPNWVQQKPGQAPRGLIGGTKFLAPGTPARFSGSLLGGKAALTLSGVQPEDEAEYYCVLWYSNRWVFGGGTKLTVL

SEQ ID NO: 468 - protein, 989 aa, Artificial Sequence
  Synthetic peptide
QVTLKESGPVLVKPTETLTLTCTVSGFSFRNARMGVSWIRQPPGKALEWLAHIFSNDEKSYSTSLKSRLTISKDTSKSQVVLTLTNMDPVDTATYFCARMPEYSSGWSGAFDIWGQGTMVTVSSGGGGSGGGGSGGGGSDIQMTQSPSSLSASVGDRVTITCRASQDIRDDLGWYQQKPGNAPKRLIYGASTLQSGVPSRFSGSGSGTEFTLTISSLQPEDFATYYCLQHNSYPLTFGGGTKVDIKSGGGGSEVQLVESGGGLVQPGGSLKLSCAASGFTFNKYAMNWVRQAPGKGLEWVARIRSKYNNYATYYADSVKDRFTISRDDSKNTAYLQMNNLKTEDTAVYYCVRHGNFGNSYISYWAYWGQGTLVTVSSGGGGSGGGGSGGGGSQTVVTQEPSLTVSPGGTVTLTCGSSTGAVTSGNYPNWVQQKPGQAPRGLIGGTKFLAPGTPARFSGSLLGGKAALTLSGVQPEDEAEYYCVLWYSNRWVFGGGTKLTVLGGGGDKTHTCPPCPAPELLGGPSVFLFPPKPKDTLMISRTPEVTCVVVDVSHEDPEVKFNWYVDGVEVHNAKTKPCEEQYGSTYRCVSVLTVLHQDWLNGKEYKCKVSNKALPAPIEKTISKAKGQPREPQVYTLPPSREEMTKNQVSLTCLVKGFYPSDIAVEWESNGQPENNYKTTPPVLDSDGSFFLYSKLTVDKSRWQQGNVFSCSVMHEALHNHYTQKSLSLSPGKGGGGSGGGGSGGGGSGGGGSGGGGSGGGGSDKTHTCPPCPAPELLGGPSVFLFPPKPKDTLMISRTPEVTCVVVDVSHEDPEVKFNWYVDGVEVHNAKTKPCEEQYGSTYRCVSVLTVLHQDWLNGKEYKCKVSNKALPAPIEKTISKAKGQPREPQVYTLPPSREEMTKNQVSLTCLVKGFYPSDIAVEWESNGQPENNYKTTPPVLDSDGSFFLYSKLTVDKSRWQQGNVFSCSVMHEALHNHYTQKSLSLSPGK

SEQ ID NO: 469 - protein, 124 aa, Artificial Sequence
  Synthetic peptide
QVTLKESGPVLVKPTETLTLTCTVSGFSFRNARMGVSWIRQPPGKCLEWLAHIFSNDEKSYSTSLKSRLTISKDTSKSQVVLTLTNMDPVDTATYFCARMPEYSSGWSGAFDIWGQGTMVTVSS

SEQ ID NO: 470 - protein, 107 aa, Artificial Sequence; identical to SEQ ID NO: 374
  Synthetic peptide

SEQ ID NO: 471 - protein, 247 aa, Artificial Sequence
  Synthetic peptide
QVTLKESGPVLVKPTETLTLTCTVSGFSFRNARMGVSWIRQPPGKCLEWLAHIFSNDEKSYSTSLKSRLTISKDTSKSQVVLTLTNMDPVDTATYFCARMPEYSSGWSGAFDIWGQGTMVTVSSGGGGSGGGGSGGGGSDIQMTQSPSSLSASVGDRVTITCRASQDIRDDLGWYQQKPGNAPKRLIYGASTLQSGVPSRFSGSGSGTEFTLTISSLQPEDFATYYCLQHNSYPLTFGCGTKVDIKS

SEQ ID NO: 472 - protein, 501 aa, Artificial Sequence
  Synthetic peptide
QVTLKESGPVLVKPTETLTLTCTVSGFSFRNARMGVSWIRQPPGKCLEWLAHIFSNDEKSYSTSLKSRLTISKDTSKSQVVLTLTNMDPVDTATYFCARMPEYSSGWSGAFDIWGQGTMVTVSSGGGGSGGGGSGGGGSDIQMTQSPSSLSASVGDRVTITCRASQDIRDDLGWYQQKPGNAPKRLIYGASTLQSGVPSRFSGSGSGTEFTLTISSLQPEDFATYYCLQHNSYPLTFGCGTKVDIKSGGGGSEVQLVESGGGLVQPGGSLKLSCAASGFTFNKYAMNWVRQAPGKGLEWVARIRSKYNNYATYYADSVKDRFTISRDDSKNTAYLQMNNLKTEDTAVYYCVRHGNFGNSYISYWAYWGQGTLVTVSSGGGGSGGGGSGGGGSQTVVTQEPSLTVSPGGTVTLTCGSSTGAVTSGNYPNWVQQKPGQAPRGLIGGTKFLAPGTPARFSGSLLGGKAALTLSGVQPEDEAEYYCVLWYSNRWVFGGGTKLTVL

SEQ ID NO: 473 - protein, 989 aa, Artificial Sequence
  Synthetic peptide
QVTLKESGPVLVKPTETLTLTCTVSGFSFRNARMGVSWIRQPPGKCLEWLAHIFSNDEKSYSTSLKSRLTISKDTSKSQVVLTLTNMDPVDTATYFCARMPEYSSGWSGAFDIWGQGTMVTVSSGGGGSGGGGSGGGGSDIQMTQSPSSLSASVGDRVTITCRASQDIRDDLGWYQQKPGNAPKRLIYGASTLQSGVPSRFSGSGSGTEFTLTISSLQPEDFATYYCLQHNSYPLTFGCGTKVDIKSGGGGSEVQLVESGGGLVQPGGSLKLSCAASGFTFNKYAMNWVRQAPGKGLEWVARIRSKYNNYATYYADSVKDRFTISRDDSKNTAYLQMNNLKTEDTAVYYCVRHGNFGNSYISYWAYWGQGTLVTVSSGGGGSGGGGSGGGGSQTVVTQEPSLTVSPGGTVTLTCGSSTGAVTSGNYPNWVQQKPGQAPRGLIGGTKFLAPGTPARFSGSLLGGKAALTLSGVQPEDEAEYYCVLWYSNRWVFGGGTKLTVLGGGGDKTHTCPPCPAPELLGGPSVFLFPPKPKDTLMISRTPEVTCVVVDVSHEDPEVKFNWYVDGVEVHNAKTKPCEEQYGSTYRCVSVLTVLHQDWLNGKEYKCKVSNKALPAPIEKTISKAKGQPREPQVYTLPPSREEMTKNQVSLTCLVKGFYPSDIAVEWESNGQPENNYKTTPPVLDSDGSFFLYSKLTVDKSRWQQGNVFSCSVMHEALHNHYTQKSLSLSPGKGGGGSGGGGSGGGGSGGGGSGGGGSGGGGSDKTHTCPPCPAPELLGGPSVFLFPPKPKDTLMISRTPEVTCVVVDVSHEDPEVKFNWYVDGVEVHNAKTKPCEEQYGSTYRCVSVLTVLHQDWLNGKEYKCKVSNKALPAPIEKTISKAKGQPREPQVYTLPPSREEMTKNQVSLTCLVKGFYPSDIAVEWESNGQPENNYKTTPPVLDSDGSFFLYSKLTVDKSRWQQGNVFSCSVMHEALHNHYTQKSLSLSPGK

SEQ ID NO: 474 - protein, 7 aa, Artificial Sequence
  Synthetic peptide
NARMGVS

SEQ ID NO: 475 - protein, 16 aa, Artificial Sequence
  Synthetic peptide
HIFSNDEKSYSTSLKS

SEQ ID NO: 476 - protein, 14 aa, Artificial Sequence
  Synthetic peptide
MPEYSSGWSGAFDI

SEQ ID NO: 477 - protein, 11 aa, Artificial Sequence
  Synthetic peptide
RASQDIGYDLG

SEQ ID NO: 478 - protein, 7 aa, Artificial Sequence
  Synthetic peptide
AASTLQS

SEQ ID NO: 479 - protein, 9 aa, Artificial Sequence
  Synthetic peptide
LQHNSFPWT

SEQ ID NO: 480 - protein, 124 aa, Artificial Sequence
  Synthetic peptide
QVTLKESGPALVKPTETLTLTCTVSGFSFRNARMGVSWIRQPPGKALEWLAHIFSNDEKSYSTSLKSRLTISKDTSKSQVVLTLTNMDPVDTATYFCARMPEYSSGWSGAFDIWGQGTMVTVSS

SEQ ID NO: 481 - protein, 107 aa, Artificial Sequence
  Synthetic peptide
DIQMTQSPSSLSASVGDRVTITCRASQDIGYDLGWYQQKPGKAPKRLIYAASTLQSGVPSRFSGSGSGTEFTLIISSLQPEDFATYYCLQHNSFPWTFGQGTKVEIK

SEQ ID NO: 482 - protein, 247 aa, Artificial Sequence
  Synthetic peptide
QVTLKESGPALVKPTETLTLTCTVSGFSFRNARMGVSWIRQPPGKALEWLAHIFSNDEKSYSTSLKSRLTISKDTSKSQVVLTLTNMDPVDTATYFCARMPEYSSGWSGAFDIWGQGTMVTVSSGGGGSGGGGSGGGGSDIQMTQSPSSLSASVGDRVTITCRASQDIGYDLGWYQQKPGKAPKRLIYAASTLQSGVPSRFSGSGSGTEFTLIISSLQPEDFATYYCLQHNSFPWTFGQGTKVEIKS

SEQ ID NO: 483 - protein, 501 aa, Artificial Sequence
  Synthetic peptide
QVTLKESGPALVKPTETLTLTCTVSGFSFRNARMGVSWIRQPPGKALEWLAHIFSNDEKSYSTSLKSRLTISKDTSKSQVVLTLTNMDPVDTATYFCARMPEYSSGWSGAFDIWGQGTMVTVSSGGGGSGGGGSGGGGSDIQMTQSPSSLSASVGDRVTITCRASQDIGYDLGWYQQKPGKAPKRLIYAASTLQSGVPSRFSGSGSGTEFTLIISSLQPEDFATYYCLQHNSFPWTFGQGTKVEIKSGGGGSEVQLVESGGGLVQPGGSLKLSCAASGFTFNKYAMNWVRQAPGKGLEWVARIRSKYNNYATYYADSVKDRFTISRDDSKNTAYLQMNNLKTEDTAVYYCVRHGNFGNSYISYWAYWGQGTLVTVSSGGGGSGGGGSGGGGSQTVVTQEPSLTVSPGGTVTLTCGSSTGAVTSGNYPNWVQQKPGQAPRGLIGGTKFLAPGTPARFSGSLLGGKAALTLSGVQPEDEAEYYCVLWYSNRWVFGGGTKLTVL

SEQ ID NO: 484 - protein, 989 aa, Artificial Sequence
  Synthetic peptide
QVTLKESGPALVKPTETLTLTCTVSGFSFRNARMGVSWIRQPPGKALEWLAHIFSNDEKSYSTSLKSRLTISKDTSKSQVVLTLTNMDPVDTATYFCARMPEYSSGWSGAFDIWGQGTMVTVSSGGGGSGGGGSGGGGSDIQMTQSPSSLSASVGDRVTITCRASQDIGYDLGWYQQKPGKAPKRLIYAASTLQSGVPSRFSGSGSGTEFTLIISSLQPEDFATYYCLQHNSFPWTFGQGTKVEIKSGGGGSEVQLVESGGGLVQPGGSLKLSCAASGFTFNKYAMNWVRQAPGKGLEWVARIRSKYNNYATYYADSVKDRFTISRDDSKNTAYLQMNNLKTEDTAVYYCVRHGNFGNSYISYWAYWGQGTLVTVSSGGGGSGGGGSGGGGSQTVVTQEPSLTVSPGGTVTLTCGSSTGAVTSGNYPNWVQQKPGQAPRGLIGGTKFLAPGTPARFSGSLLGGKAALTLSGVQPEDEAEYYCVLWYSNRWVFGGGTKLTVLGGGGDKTHTCPPCPAPELLGGPSVFLFPPKPKDTLMISRTPEVTCVVVDVSHEDPEVKFNWYVDGVEVHNAKTKPCEEQYGSTYRCVSVLTVLHQDWLNGKEYKCKVSNKALPAPIEKTISKAKGQPREPQVYTLPPSREEMTKNQVSLTCLVKGFYPSDIAVEWESNGQPENNYKTTPPVLDSDGSFFLYSKLTVDKSRWQQGNVFSCSVMHEALHNHYTQKSLSLSPGKGGGGSGGGGSGGGGSGGGGSGGGGSGGGGSDKTHTCPPCPAPELLGGPSVFLFPPKPKDTLMISRTPEVTCVVVDVSHEDPEVKFNWYVDGVEVHNAKTKPCEEQYGSTYRCVSVLTVLHQDWLNGKEYKCKVSNKALPAPIEKTISKAKGQPREPQVYTLPPSREEMTKNQVSLTCLVKGFYPSDIAVEWESNGQPENNYKTTPPVLDSDGSFFLYSKLTVDKSRWQQGNVFSCSVMHEALHNHYTQKSLSLSPGK

SEQ ID NO: 485 - protein, 124 aa, Artificial Sequence
  Synthetic peptide
QVTLKESGPALVKPTETLTLTCTVSGFSFRNARMGVSWIRQPPGKCLEWLAHIFSNDEKSYSTSLKSRLTISKDTSKSQVVLTLTNMDPVDTATYFCARMPEYSSGWSGAFDIWGQGTMVTVSS

SEQ ID NO: 486 - protein, 107 aa, Artificial Sequence
  Synthetic peptide
DIQMTQSPSSLSASVGDRVTITCRASQDIGYDLGWYQQKPGKAPKRLIYAASTLQSGVPSRFSGSGSGTEFTLIISSLQPEDFATYYCLQHNSFPWTFGCGTKVEIK

SEQ ID NO: 487 - protein, 247 aa, Artificial Sequence
  Synthetic peptide
QVTLKESGPALVKPTETLTLTCTVSGFSFRNARMGVSWIRQPPGKCLEWLAHIFSNDEKSYSTSLKSRLTISKDTSKSQVVLTLTNMDPVDTATYFCARMPEYSSGWSGAFDIWGQGTMVTVSSGGGGSGGGGSGGGGSDIQMTQSPSSLSASVGDRVTITCRASQDIGYDLGWYQQKPGKAPKRLIYAASTLQSGVPSRFSGSGSGTEFTLIISSLQPEDFATYYCLQHNSFPWTFGCGTKVEIKS

SEQ ID NO: 488 - protein, 501 aa, Artificial Sequence
  Synthetic peptide
QVTLKESGPALVKPTETLTLTCTVSGFSFRNARMGVSWIRQPPGKCLEWLAHIFSNDEKSYSTSLKSRLTISKDTSKSQVVLTLTNMDPVDTATYFCARMPEYSSGWSGAFDIWGQGTMVTVSSGGGGSGGGGSGGGGSDIQMTQSPSSLSASVGDRVTITCRASQDIGYDLGWYQQKPGKAPKRLIYAASTLQSGVPSRFSGSGSGTEFTLIISSLQPEDFATYYCLQHNSFPWTFGCGTKVEIKSGGGGSEVQLVESGGGLVQPGGSLKLSCAASGFTFNKYAMNWVRQAPGKGLEWVARIRSKYNNYATYYADSVKDRFTISRDDSKNTAYLQMNNLKTEDTAVYYCVRHGNFGNSYISYWAYWGQGTLVTVSSGGGGSGGGGSGGGGSQTVVTQEPSLTVSPGGTVTLTCGSSTGAVTSGNYPNWVQQKPGQAPRGLIGGTKFLAPGTPARFSGSLLGGKAALTLSGVQPEDEAEYYCVLWYSNRWVFGGGTKLTVL

SEQ ID NO: 489 - protein, 989 aa, Artificial Sequence
  Synthetic peptide
QVTLKESGPALVKPTETLTLTCTVSGFSFRNARMGVSWIRQPPGKCLEWLAHIFSNDEKSYSTSLKSRLTISKDTSKSQVVLTLTNMDPVDTATYFCARMPEYSSGWSGAFDIWGQGTMVTVSSGGGGSGGGGSGGGGSDIQMTQSPSSLSASVGDRVTITCRASQDIGYDLGWYQQKPGKAPKRLIYAASTLQSGVPSRFSGSGSGTEFTLIISSLQPEDFATYYCLQHNSFPWTFGCGTKVEIKSGGGGSEVQLVESGGGLVQPGGSLKLSCAASGFTFNKYAMNWVRQAPGKGLEWVARIRSKYNNYATYYADSVKDRFTISRDDSKNTAYLQMNNLKTEDTAVYYCVRHGNFGNSYISYWAYWGQGTLVTVSSGGGGSGGGGSGGGGSQTVVTQEPSLTVSPGGTVTLTCGSSTGAVTSGNYPNWVQQKPGQAPRGLIGGTKFLAPGTPARFSGSLLGGKAALTLSGVQPEDEAEYYCVLWYSNRWVFGGGTKLTVLGGGGDKTHTCPPCPAPELLGGPSVFLFPPKPKDTLMISRTPEVTCVVVDVSHEDPEVKFNWYVDGVEVHNAKTKPCEEQYGSTYRCVSVLTVLHQDWLNGKEYKCKVSNKALPAPIEKTISKAKGQPREPQVYTLPPSREEMTKNQVSLTCLVKGFYPSDIAVEWESNGQPENNYKTTPPVLDSDGSFFLYSKLTVDKSRWQQGNVFSCSVMHEALHNHYTQKSLSLSPGKGGGGSGGGGSGGGGSGGGGSGGGGSGGGGSDKTHTCPPCPAPELLGGPSVFLFPPKPKDTLMISRTPEVTCVVVDVSHEDPEVKFNWYVDGVEVHNAKTKPCEEQYGSTYRCVSVLTVLHQDWLNGKEYKCKVSNKALPAPIEKTISKAKGQPREPQVYTLPPSREEMTKNQVSLTCLVKGFYPSDIAVEWESNGQPENNYKTTPPVLDSDGSFFLYSKLTVDKSRWQQGNVFSCSVMHEALHNHYTQKSLSLSPGK

SEQ ID NO: 490 - protein, 7 aa, Artificial Sequence
  Synthetic peptide
NARMGVS

SEQ ID NO: 491 - protein, 16 aa, Artificial Sequence
  Synthetic peptide
HIFSNDEKSYRTSLKS

SEQ ID NO: 492 - protein, 14 aa, Artificial Sequence
  Synthetic peptide
IVGYGSGWYAYFDY

SEQ ID NO: 493 - protein, 11 aa, Artificial Sequence
  Synthetic peptide
RASQGIRNDLG

SEQ ID NO: 494 - protein, 7 aa, Artificial Sequence
  Synthetic peptide
AASSLQS

SEQ ID NO: 495 - protein, 9 aa, Artificial Sequence
  Synthetic peptide
LQHNSYPLT

SEQ ID NO: 496 - protein, 124 aa, Artificial Sequence
  Synthetic peptide
QVTLKESGPALVKPTQTLTLTCTFSGFSLSNARMGVSWIRQPPGKALEWLAHIFSNDEKSYRTSLKSRLTISKDTSKSQVVLTMTNMDPVDTATYYCARIVGYGSGWYAYFDYWGQGTLVTVSS

SEQ ID NO: 497 - protein, 107 aa, Artificial Sequence
  Synthetic peptide
DIQMTQSPSSLSASVGDRVTITCRASQGIRNDLGWYQQKPGKAPKRLIYAASSLQSGVPSRFSGSGSGTEFTLTISSLQPEDFATYYCLQHNSYPLTFGGGTKVEIK

SEQ ID NO: 498 - protein, 247 aa, Artificial Sequence
  Synthetic peptide
QVTLKESGPALVKPTQTLTLTCTFSGFSLSNARMGVSWIRQPPGKALEWLAHIFSNDEKSYRTSLKSRLTISKDTSKSQVVLTMTNMDPVDTATYYCARIVGYGSGWYAYFDYWGQGTLVTVSSGGGGSGGGGSGGGGSDIQMTQSPSSLSASVGDRVTITCRASQGIRNDLGWYQQKPGKAPKRLIYAASSLQSGVPSRFSGSGSGTEFTLTISSLQPEDFATYYCLQHNSYPLTFGGGTKVEIKS

SEQ ID NO: 499 - protein, 501 aa, Artificial Sequence
  Synthetic peptide
QVTLKESGPALVKPTQTLTLTCTFSGFSLSNARMGVSWIRQPPGKALEWLAHIFSNDEKSYRTSLKSRLTISKDTSKSQVVLTMTNMDPVDTATYYCARIVGYGSGWYAYFDYWGQGTLVTVSSGGGGSGGGGSGGGGSDIQMTQSPSSLSASVGDRVTITCRASQGIRNDLGWYQQKPGKAPKRLIYAASSLQSGVPSRFSGSGSGTEFTLTISSLQPEDFATYYCLQHNSYPLTFGGGTKVEIKSGGGGSEVQLVESGGGLVQPGGSLKLSCAASGFTFNKYAMNWVRQAPGKGLEWVARIRSKYNNYATYYADSVKDRFTISRDDSKNTAYLQMNNLKTEDTAVYYCVRHGNFGNSYISYWAYWGQGTLVTVSSGGGGSGGGGSGGGGSQTVVTQEPSLTVSPGGTVTLTCGSSTGAVTSGNYPNWVQQKPGQAPRGLIGGTKFLAPGTPARFSGSLLGGKAALTLSGVQPEDEAEYYCVLWYSNRWVFGGGTKLTVL

SEQ ID NO: 500 - protein, 989 aa, Artificial Sequence
  Synthetic peptide
QVTLKESGPALVKPTQTLTLTCTFSGFSLSNARMGVSWIRQPPGKALEWLAHIFSNDEKSYRTSLKSRLTISKDTSKSQVVLTMTNMDPVDTATYYCARIVGYGSGWYAYFDYWGQGTLVTVSSGGGGSGGGGSGGGGSDIQMTQSPSSLSASVGDRVTITCRASQGIRNDLGWYQQKPGKAPKRLIYAASSLQSGVPSRFSGSGSGTEFTLTISSLQPEDFATYYCLQHNSYPLTFGGGTKVEIKSGGGGSEVQLVESGGGLVQPGGSLKLSCAASGFTFNKYAMNWVRQAPGKGLEWVARIRSKYNNYATYYADSVKDRFTISRDDSKNTAYLQMNNLKTEDTAVYYCVRHGNFGNSYISYWAYWGQGTLVTVSSGGGGSGGGGSGGGGSQTVVTQEPSLTVSPGGTVTLTCGSSTGAVTSGNYPNWVQQKPGQAPRGLIGGTKFLAPGTPARFSGSLLGGKAALTLSGVQPEDEAEYYCVLWYSNRWVFGGGTKLTVLGGGGDKTHTCPPCPAPELLGGPSVFLFPPKPKDTLMISRTPEVTCVVVDVSHEDPEVKFNWYVDGVEVHNAKTKPCEEQYGSTYRCVSVLTVLHQDWLNGKEYKCKVSNKALPAPIEKTISKAKGQPREPQVYTLPPSREEMTKNQVSLTCLVKGFYPSDIAVEWESNGQPENNYKTTPPVLDSDGSFFLYSKLTVDKSRWQQGNVFSCSVMHEALHNHYTQKSLSLSPGKGGGGSGGGGSGGGGSGGGGSGGGGSGGGGSDKTHTCPPCPAPELLGGPSVFLFPPKPKDTLMISRTPEVTCVVVDVSHEDPEVKFNWYVDGVEVHNAKTKPCEEQYGSTYRCVSVLTVLHQDWLNGKEYKCKVSNKALPAPIEKTISKAKGQPREPQVYTLPPSREEMTKNQVSLTCLVKGFYPSDIAVEWESNGQPENNYKTTPPVLDSDGSFFLYSKLTVDKSRWQQGNVFSCSVMHEALHNHYTQKSLSLSPGK

SEQ ID NO: 501 - protein, 124 aa, Artificial Sequence
  Synthetic peptide
QVTLKESGPALVKPTQTLTLTCTFSGFSLSNARMGVSWIRQPPGKCLEWLAHIFSNDEKSYRTSLKSRLTISKDTSKSQVVLTMTNMDPVDTATYYCARIVGYGSGWYAYFDYWGQGTLVTVSS

SEQ ID NO: 502 - protein, 107 aa, Artificial Sequence
  Synthetic peptide
DIQMTQSPSSLSASVGDRVTITCRASQGIRNDLGWYQQKPGKAPKRLIYAASSLQSGVPSRFSGSGSGTEFTLTISSLQPEDFATYYCLQHNSYPLTFGCGTKVEIK

SEQ ID NO: 503 - protein, 247 aa, Artificial Sequence
  Synthetic peptide
QVTLKESGPALVKPTQTLTLTCTFSGFSLSNARMGVSWIRQPPGKCLEWLAHIFSNDEKSYRTSLKSRLTISKDTSKSQVVLTMTNMDPVDTATYYCARIVGYGSGWYAYFDYWGQGTLVTVSSGGGGSGGGGSGGGGSDIQMTQSPSSLSASVGDRVTITCRASQGIRNDLGWYQQKPGKAPKRLIYAASSLQSGVPSRFSGSGSGTEFTLTISSLQPEDFATYYCLQHNSYPLTFGCGTKVEIKS

SEQ ID NO: 504 - protein, 501 aa, Artificial Sequence
  Synthetic peptide
QVTLKESGPALVKPTQTLTLTCTFSGFSLSNARMGVSWIRQPPGKCLEWLAHIFSNDEKSYRTSLKSRLTISKDTSKSQVVLTMTNMDPVDTATYYCARIVGYGSGWYAYFDYWGQGTLVTVSSGGGGSGGGGSGGGGSDIQMTQSPSSLSASVGDRVTITCRASQGIRNDLGWYQQKPGKAPKRLIYAASSLQSGVPSRFSGSGSGTEFTLTISSLQPEDFATYYCLQHNSYPLTFGCGTKVEIKSGGGGSEVQLVESGGGLVQPGGSLKLSCAASGFTFNKYAMNWVRQAPGKGLEWVARIRSKYNNYATYYADSVKDRFTISRDDSKNTAYLQMNNLKTEDTAVYYCVRHGNFGNSYISYWAYWGQGTLVTVSSGGGGSGGGGSGGGGSQTVVTQEPSLTVSPGGTVTLTCGSSTGAVTSGNYPNWVQQKPGQAPRGLIGGTKFLAPGTPARFSGSLLGGKAALTLSGVQPEDEAEYYCVLWYSNRWVFGGGTKLTVL

SEQ ID NO: 505 - protein, 989 aa, Artificial Sequence
  Synthetic peptide
QVTLKESGPALVKPTQTLTLTCTFSGFSLSNARMGVSWIRQPPGKCLEWLAHIFSNDEKSYRTSLKSRLTISKDTSKSQVVLTMTNMDPVDTATYYCARIVGYGSGWYAYFDYWGQGTLVTVSSGGGGSGGGGSGGGGSDIQMTQSPSSLSASVGDRVTITCRASQGIRNDLGWYQQKPGKAPKRLIYAASSLQSGVPSRFSGSGSGTEFTLTISSLQPEDFATYYCLQHNSYPLTFGCGTKVEIKSGGGGSEVQLVESGGGLVQPGGSLKLSCAASGFTFNKYAMNWVRQAPGKGLEWVARIRSKYNNYATYYADSVKDRFTISRDDSKNTAYLQMNNLKTEDTAVYYCVRHGNFGNSYISYWAYWGQGTLVTVSSGGGGSGGGGSGGGGSQTVVTQEPSLTVSPGGTVTLTCGSSTGAVTSGNYPNWVQQKPGQAPRGLIGGTKFLAPGTPARFSGSLLGGKAALTLSGVQPEDEAEYYCVLWYSNRWVFGGGTKLTVLGGGGDKTHTCPPCPAPELLGGPSVFLFPPKPKDTLMISRTPEVTCVVVDVSHEDPEVKFNWYVDGVEVHNAKTKPCEEQYGSTYRCVSVLTVLHQDWLNGKEYKCKVSNKALPAPIEKTISKAKGQPREPQVYTLPPSREEMTKNQVSLTCLVKGFYPSDIAVEWESNGQPENNYKTTPPVLDSDGSFFLYSKLTVDKSRWQQGNVFSCSVMHEALHNHYTQKSLSLSPGKGGGGSGGGGSGGGGSGGGGSGGGGSGGGGSDKTHTCPPCPAPELLGGPSVFLFPPKPKDTLMISRTPEVTCVVVDVSHEDPEVKFNWYVDGVEVHNAKTKPCEEQYGSTYRCVSVLTVLHQDWLNGKEYKCKVSNKALPAPIEKTISKAKGQPREPQVYTLPPSREEMTKNQVSLTCLVKGFYPSDIAVEWESNGQPENNYKTTPPVLDSDGSFFLYSKLTVDKSRWQQGNVFSCSVMHEALHNHYTQKSLSLSPGK

SEQ ID NO: 506 - protein, 7 aa, Artificial Sequence
  Synthetic peptide
NARMGVS

SEQ ID NO: 507 - protein, 16 aa, Artificial Sequence
  Synthetic peptide
LIYWNDDKRYSPSLKS

SEQ ID NO: 508 - protein, 14 aa, Artificial Sequence
  Synthetic peptide
MVGYGSGWYAYFDY

SEQ ID NO: 509 - protein, 11 aa, Artificial Sequence
  Synthetic peptide
RASQGIRNDLG

SEQ ID NO: 510 - protein, 7 aa, Artificial Sequence
  Synthetic peptide
AASSLQS

SEQ ID NO: 511 - protein, 9 aa, Artificial Sequence
  Synthetic peptide
LQHNSYPLT

SEQ ID NO: 512 - protein, 124 aa, Artificial Sequence
  Synthetic peptide
QVTLKESGPVLVKPTQTLTLTCTFSGFSLSNARMGVSWIRQPPGKALEWLALIYWNDDKRYSPSLKSRLTITKDTSKNQVVLTMTNMDPVDTATYYCARMVGYGSGWYAYFDYWGQGTLVTVSS

SEQ ID NO: 513 - protein, 107 aa, Artificial Sequence; identical to SEQ ID NO: 497
  Synthetic peptide

SEQ ID NO: 514 - protein, 247 aa, Artificial Sequence
  Synthetic peptide
QVTLKESGPVLVKPTQTLTLTCTFSGFSLSNARMGVSWIRQPPGKALEWLALIYWNDDKRYSPSLKSRLTITKDTSKNQVVLTMTNMDPVDTATYYCARMVGYGSGWYAYFDYWGQGTLVTVSSGGGGSGGGGSGGGGSDIQMTQSPSSLSASVGDRVTITCRASQGIRNDLGWYQQKPGKAPKRLIYAASSLQSGVPSRFSGSGSGTEFTLTISSLQPEDFATYYCLQHNSYPLTFGGGTKVEIKS

SEQ ID NO: 515 - protein, 501 aa, Artificial Sequence
  Synthetic peptide
QVTLKESGPVLVKPTQTLTLTCTFSGFSLSNARMGVSWIRQPPGKALEWLALIYWNDDKRYSPSLKSRLTITKDTSKNQVVLTMTNMDPVDTATYYCARMVGYGSGWYAYFDYWGQGTLVTVSSGGGGSGGGGSGGGGSDIQMTQSPSSLSASVGDRVTITCRASQGIRNDLGWYQQKPGKAPKRLIYAASSLQSGVPSRFSGSGSGTEFTLTISSLQPEDFATYYCLQHNSYPLTFGGGTKVEIKSGGGGSEVQLVESGGGLVQPGGSLKLSCAASGFTFNKYAMNWVRQAPGKGLEWVARIRSKYNNYATYYADSVKDRFTISRDDSKNTAYLQMNNLKTEDTAVYYCVRHGNFGNSYISYWAYWGQGTLVTVSSGGGGSGGGGSGGGGSQTVVTQEPSLTVSPGGTVTLTCGSSTGAVTSGNYPNWVQQKPGQAPRGLIGGTKFLAPGTPARFSGSLLGGKAALTLSGVQPEDEAEYYCVLWYSNRWVFGGGTKLTVL

SEQ ID NO: 516 - protein, 989 aa, Artificial Sequence
  Synthetic peptide
QVTLKESGPVLVKPTQTLTLTCTFSGFSLSNARMGVSWIRQPPGKALEWLALIYWNDDKRYSPSLKSRLTITKDTSKNQVVLTMTNMDPVDTATYYCARMVGYGSGWYAYFDYWGQGTLVTVSSGGGGSGGGGSGGGGSDIQMTQSPSSLSASVGDRVTITCRASQGIRNDLGWYQQKPGKAPKRLIYAASSLQSGVPSRFSGSGSGTEFTLTISSLQPEDFATYYCLQHNSYPLTFGGGTKVEIKSGGGGSEVQLVESGGGLVQPGGSLKLSCAASGFTFNKYAMNWVRQAPGKGLEWVARIRSKYNNYATYYADSVKDRFTISRDDSKNTAYLQMNNLKTEDTAVYYCVRHGNFGNSYISYWAYWGQGTLVTVSSGGGGSGGGGSGGGGSQTVVTQEPSLTVSPGGTVTLTCGSSTGAVTSGNYPNWVQQKPGQAPRGLIGGTKFLAPGTPARFSGSLLGGKAALTLSGVQPEDEAEYYCVLWYSNRWVFGGGTKLTVLGGGGDKTHTCPPCPAPELLGGPSVFLFPPKPKDTLMISRTPEVTCVVVDVSHEDPEVKFNWYVDGVEVHNAKTKPCEEQYGSTYRCVSVLTVLHQDWLNGKEYKCKVSNKALPAPIEKTISKAKGQPREPQVYTLPPSREEMTKNQVSLTCLVKGFYPSDIAVEWESNGQPENNYKTTPPVLDSDGSFFLYSKLTVDKSRWQQGNVFSCSVMHEALHNHYTQKSLSLSPGKGGGGSGGGGSGGGGSGGGGSGGGGSGGGGSDKTHTCPPCPAPELLGGPSVFLFPPKPKDTLMISRTPEVTCVVVDVSHEDPEVKFNWYVDGVEVHNAKTKPCEEQYGSTYRCVSVLTVLHQDWLNGKEYKCKVSNKALPAPIEKTISKAKGQPREPQVYTLPPSREEMTKNQVSLTCLVKGFYPSDIAVEWESNGQPENNYKTTPPVLDSDGSFFLYSKLTVDKSRWQQGNVFSCSVMHEALHNHYTQKSLSLSPGK

SEQ ID NO: 517 - protein, 124 aa, Artificial Sequence
  Synthetic peptide
QVTLKESGPVLVKPTQTLTLTCTFSGFSLSNARMGVSWIRQPPGKCLEWLALIYWNDDKRYSPSLKSRLTITKDTSKNQVVLTMTNMDPVDTATYYCARMVGYGSGWYAYFDYWGQGTLVTVSS

SEQ ID NO: 518 - protein, 107 aa, Artificial Sequence; identical to SEQ ID NO: 502
  Synthetic peptide

SEQ ID NO: 519 - protein, 247 aa, Artificial Sequence
  Synthetic peptide
QVTLKESGPVLVKPTQTLTLTCTFSGFSLSNARMGVSWIRQPPGKCLEWLALIYWNDDKRYSPSLKSRLTITKDTSKNQVVLTMTNMDPVDTATYYCARMVGYGSGWYAYFDYWGQGTLVTVSSGGGGSGGGGSGGGGSDIQMTQSPSSLSASVGDRVTITCRASQGIRNDLGWYQQKPGKAPKRLIYAASSLQSGVPSRFSGSGSGTEFTLTISSLQPEDFATYYCLQHNSYPLTFGCGTKVEIKS

SEQ ID NO: 520 - protein, 501 aa, Artificial Sequence
  Synthetic peptide
QVTLKESGPVLVKPTQTLTLTCTFSGFSLSNARMGVSWIRQPPGKCLEWLALIYWNDDKRYSPSLKSRLTITKDTSKNQVVLTMTNMDPVDTATYYCARMVGYGSGWYAYFDYWGQGTLVTVSSGGGGSGGGGSGGGGSDIQMTQSPSSLSASVGDRVTITCRASQGIRNDLGWYQQKPGKAPKRLIYAASSLQSGVPSRFSGSGSGTEFTLTISSLQPEDFATYYCLQHNSYPLTFGCGTKVEIKSGGGGSEVQLVESGGGLVQPGGSLKLSCAASGFTFNKYAMNWVRQAPGKGLEWVARIRSKYNNYATYYADSVKDRFTISRDDSKNTAYLQMNNLKTEDTAVYYCVRHGNFGNSYISYWAYWGQGTLVTVSSGGGGSGGGGSGGGGSQTVVTQEPSLTVSPGGTVTLTCGSSTGAVTSGNYPNWVQQKPGQAPRGLIGGTKFLAPGTPARFSGSLLGGKAALTLSGVQPEDEAEYYCVLWYSNRWVFGGGTKLTVL

SEQ ID NO: 521 - protein, 989 aa, Artificial Sequence
  Synthetic peptide
QVTLKESGPVLVKPTQTLTLTCTFSGFSLSNARMGVSWIRQPPGKCLEWLALIYWNDDKRYSPSLKSRLTITKDTSKNQVVLTMTNMDPVDTATYYCARMVGYGSGWYAYFDYWGQGTLVTVSSGGGGSGGGGSGGGGSDIQMTQSPSSLSASVGDRVTITCRASQGIRNDLGWYQQKPGKAPKRLIYAASSLQSGVPSRFSGSGSGTEFTLTISSLQPEDFATYYCLQHNSYPLTFGCGTKVEIKSGGGGSEVQLVESGGGLVQPGGSLKLSCAASGFTFNKYAMNWVRQAPGKGLEWVARIRSKYNNYATYYADSVKDRFTISRDDSKNTAYLQMNNLKTEDTAVYYCVRHGNFGNSYISYWAYWGQGTLVTVSSGGGGSGGGGSGGGGSQTVVTQEPSLTVSPGGTVTLTCGSSTGAVTSGNYPNWVQQKPGQAPRGLIGGTKFLAPGTPARFSGSLLGGKAALTLSGVQPEDEAEYYCVLWYSNRWVFGGGTKLTVLGGGGDKTHTCPPCPAPELLGGPSVFLFPPKPKDTLMISRTPEVTCVVVDVSHEDPEVKFNWYVDGVEVHNAKTKPCEEQYGSTYRCVSVLTVLHQDWLNGKEYKCKVSNKALPAPIEKTISKAKGQPREPQVYTLPPSREEMTKNQVSLTCLVKGFYPSDIAVEWESNGQPENNYKTTPPVLDSDGSFFLYSKLTVDKSRWQQGNVFSCSVMHEALHNHYTQKSLSLSPGKGGGGSGGGGSGGGGSGGGGSGGGGSGGGGSDKTHTCPPCPAPELLGGPSVFLFPPKPKDTLMISRTPEVTCVVVDVSHEDPEVKFNWYVDGVEVHNAKTKPCEEQYGSTYRCVSVLTVLHQDWLNGKEYKCKVSNKALPAPIEKTISKAKGQPREPQVYTLPPSREEMTKNQVSLTCLVKGFYPSDIAVEWESNGQPENNYKTTPPVLDSDGSFFLYSKLTVDKSRWQQGNVFSCSVMHEALHNHYTQKSLSLSPGK

SEQ ID NO: 522 - protein, 7 aa, Artificial Sequence
  Synthetic peptide
NARMGVS

SEQ ID NO: 523 - protein, 16 aa, Artificial Sequence
  Synthetic peptide
HIFSNDEKSYSTSLKS

SEQ ID NO: 524 - protein, 14 aa, Artificial Sequence
  Synthetic peptide
IVGYGTGWYGFFDY

SEQ ID NO: 525 - protein, 11 aa, Artificial Sequence
  Synthetic peptide
RTSQGIRNDLG

SEQ ID NO: 526 - protein, 7 aa, Artificial Sequence
  Synthetic peptide
AASSLQS

SEQ ID NO: 527 - protein, 9 aa, Artificial Sequence
  Synthetic peptide
LQHNSYPLT

SEQ ID NO: 528 - protein, 124 aa, Artificial Sequence
  Synthetic peptide
QVTLKESGPALVKPTQTLTLTCTFSGFSLSNARMGVSWIRQPPGKALEWLAHIFSNDEKSYSTSLKSRLTISKDTSKSQVVLTMTDMDPEDTATYYCARIVGYGTGWYGFFDYWGQGILVTVSS

SEQ ID NO: 529 - protein, 107 aa, Artificial Sequence
  Synthetic peptide
DIQMTQSPSSLSASVGDRVTITCRTSQGIRNDLGWYQQKPGKAPKRLIYAASSLQSGVPSRFSGSGSGTEFTLTISSLQPEDFATYYCLQHNSYPLTFGGGTKVEIK

SEQ ID NO: 530 - protein, 247 aa, Artificial Sequence
  Synthetic peptide
QVTLKESGPALVKPTQTLTLTCTFSGFSLSNARMGVSWIRQPPGKALEWLAHIFSNDEKSYSTSLKSRLTISKDTSKSQVVLTMTDMDPEDTATYYCARIVGYGTGWYGFFDYWGQGILVTVSSGGGGSGGGGSGGGGSDIQMTQSPSSLSASVGDRVTITCRTSQGIRNDLGWYQQKPGKAPKRLIYAASSLQSGVPSRFSGSGSGTEFTLTISSLQPEDFATYYCLQHNSYPLTFGGGTKVEIKS

SEQ ID NO: 531 - protein, 501 aa, Artificial Sequence
  Synthetic peptide
QVTLKESGPALVKPTQTLTLTCTFSGFSLSNARMGVSWIRQPPGKALEWLAHIFSNDEKSYSTSLKSRLTISKDTSKSQVVLTMTDMDPEDTATYYCARIVGYGTGWYGFFDYWGQGILVTVSSGGGGSGGGGSGGGGSDIQMTQSPSSLSASVGDRVTITCRTSQGIRNDLGWYQQKPGKAPKRLIYAASSLQSGVPSRFSGSGSGTEFTLTISSLQPEDFATYYCLQHNSYPLTFGGGTKVEIKSGGGGSEVQLVESGGGLVQPGGSLKLSCAASGFTFNKYAMNWVRQAPGKGLEWVARIRSKYNNYATYYADSVKDRFTISRDDSKNTAYLQMNNLKTEDTAVYYCVRHGNFGNSYISYWAYWGQGTLVTVSSGGGGSGGGGSGGGGSQTVVTQEPSLTVSPGGTVTLTCGSSTGAVTSGNYPNWVQQKPGQAPRGLIGGTKFLAPGTPARFSGSLLGGKAALTLSGVQPEDEAEYYCVLWYSNRWVFGGGTKLTVL

SEQ ID NO: 532 - protein, 989 aa, Artificial Sequence
  Synthetic peptide
QVTLKESGPALVKPTQTLTLTCTFSGFSLSNARMGVSWIRQPPGKALEWLAHIFSNDEKSYSTSLKSRLTISKDTSKSQVVLTMTDMDPEDTATYYCARIVGYGTGWYGFFDYWGQGILVTVSSGGGGSGGGGSGGGGSDIQMTQSPSSLSASVGDRVTITCRTSQGIRNDLGWYQQKPGKAPKRLIYAASSLQSGVPSRFSGSGSGTEFTLTISSLQPEDFATYYCLQHNSYPLTFGGGTKVEIKSGGGGSEVQLVESGGGLVQPGGSLKLSCAASGFTFNKYAMNWVRQAPGKGLEWVARIRSKYNNYATYYADSVKDRFTISRDDSKNTAYLQMNNLKTEDTAVYYCVRHGNFGNSYISYWAYWGQGTLVTVSSGGGGSGGGGSGGGGSQTVVTQEPSLTVSPGGTVTLTCGSSTGAVTSGNYPNWVQQKPGQAPRGLIGGTKFLAPGTPARFSGSLLGGKAALTLSGVQPEDEAEYYCVLWYSNRWVFGGGTKLTVLGGGGDKTHTCPPCPAPELLGGPSVFLFPPKPKDTLMISRTPEVTCVVVDVSHEDPEVKFNWYVDGVEVHNAKTKPCEEQYGSTYRCVSVLTVLHQDWLNGKEYKCKVSNKALPAPIEKTISKAKGQPREPQVYTLPPSREEMTKNQVSLTCLVKGFYPSDIAVEWESNGQPENNYKTTPPVLDSDGSFFLYSKLTVDKSRWQQGNVFSCSVMHEALHNHYTQKSLSLSPGKGGGGSGGGGSGGGGSGGGGSGGGGSGGGGSDKTHTCPPCPAPELLGGPSVFLFPPKPKDTLMISRTPEVTCVVVDVSHEDPEVKFNWYVDGVEVHNAKTKPCEEQYGSTYRCVSVLTVLHQDWLNGKEYKCKVSNKALPAPIEKTISKAKGQPREPQVYTLPPSREEMTKNQVSLTCLVKGFYPSDIAVEWESNGQPENNYKTTPPVLDSDGSFFLYSKLTVDKSRWQQGNVFSCSVMHEALHNHYTQKSLSLSPGK

SEQ ID NO: 533 - protein, 124 aa, Artificial Sequence
  Synthetic peptide
QVTLKESGPALVKPTQTLTLTCTFSGFSLSNARMGVSWIRQPPGKCLEWLAHIFSNDEKSYSTSLKSRLTISKDTSKSQVVLTMTDMDPEDTATYYCARIVGYGTGWYGFFDYWGQGILVTVSS

SEQ ID NO: 534 - protein, 107 aa, Artificial Sequence
  Synthetic peptide
DIQMTQSPSSLSASVGDRVTITCRTSQGIRNDLGWYQQKPGKAPKRLIYAASSLQSGVPSRFSGSGSGTEFTLTISSLQPEDFATYYCLQHNSYPLTFGCGTKVEIK

SEQ ID NO: 535 - protein, 247 aa, Artificial Sequence
  Synthetic peptide
QVTLKESGPALVKPTQTLTLTCTFSGFSLSNARMGVSWIRQPPGKCLEWLAHIFSNDEKSYSTSLKSRLTISKDTSKSQVVLTMTDMDPEDTATYYCARIVGYGTGWYGFFDYWGQGILVTVSSGGGGSGGGGSGGGGSDIQMTQSPSSLSASVGDRVTITCRTSQGIRNDLGWYQQKPGKAPKRLIYAASSLQSGVPSRFSGSGSGTEFTLTISSLQPEDFATYYCLQHNSYPLTFGCGTKVEIKS

SEQ ID NO: 536 - protein, 501 aa, Artificial Sequence
  Synthetic peptide
QVTLKESGPALVKPTQTLTLTCTFSGFSLSNARMGVSWIRQPPGKCLEWLAHIFSNDEKSYSTSLKSRLTISKDTSKSQVVLTMTDMDPEDTATYYCARIVGYGTGWYGFFDYWGQGILVTVSSGGGGSGGGGSGGGGSDIQMTQSPSSLSASVGDRVTITCRTSQGIRNDLGWYQQKPGKAPKRLIYAASSLQSGVPSRFSGSGSGTEFTLTISSLQPEDFATYYCLQHNSYPLTFGCGTKVEIKSGGGGSEVQLVESGGGLVQPGGSLKLSCAASGFTFNKYAMNWVRQAPGKGLEWVARIRSKYNNYATYYADSVKDRFTISRDDSKNTAYLQMNNLKTEDTAVYYCVRHGNFGNSYISYWAYWGQGTLVTVSSGGGGSGGGGSGGGGSQTVVTQEPSLTVSPGGTVTLTCGSSTGAVTSGNYPNWVQQKPGQAPRGLIGGTKFLAPGTPARFSGSLLGGKAALTLSGVQPEDEAEYYCVLWYSNRWVFGGGTKLTVL

SEQ ID NO: 537 - protein, 989 aa, Artificial Sequence
  Synthetic peptide
QVTLKESGPALVKPTQTLTLTCTFSGFSLSNARMGVSWIRQPPGKCLEWLAHIFSNDEKSYSTSLKSRLTISKDTSKSQVVLTMTDMDPEDTATYYCARIVGYGTGWYGFFDYWGQGILVTVSSGGGGSGGGGSGGGGSDIQMTQSPSSLSASVGDRVTITCRTSQGIRNDLGWYQQKPGKAPKRLIYAASSLQSGVPSRFSGSGSGTEFTLTISSLQPEDFATYYCLQHNSYPLTFGCGTKVEIKSGGGGSEVQLVESGGGLVQPGGSLKLSCAASGFTFNKYAMNWVRQAPGKGLEWVARIRSKYNNYATYYADSVKDRFTISRDDSKNTAYLQMNNLKTEDTAVYYCVRHGNFGNSYISYWAYWGQGTLVTVSSGGGGSGGGGSGGGGSQTVVTQEPSLTVSPGGTVTLTCGSSTGAVTSGNYPNWVQQKPGQAPRGLIGGTKFLAPGTPARFSGSLLGGKAALTLSGVQPEDEAEYYCVLWYSNRWVFGGGTKLTVLGGGGDKTHTCPPCPAPELLGGPSVFLFPPKPKDTLMISRTPEVTCVVVDVSHEDPEVKFNWYVDGVEVHNAKTKPCEEQYGSTYRCVSVLTVLHQDWLNGKEYKCKVSNKALPAPIEKTISKAKGQPREPQVYTLPPSREEMTKNQVSLTCLVKGFYPSDIAVEWESNGQPENNYKTTPPVLDSDGSFFLYSKLTVDKSRWQQGNVFSCSVMHEALHNHYTQKSLSLSPGKGGGGSGGGGSGGGGSGGGGSGGGGSGGGGSDKTHTCPPCPAPELLGGPSVFLFPPKPKDTLMISRTPEVTCVVVDVSHEDPEVKFNWYVDGVEVHNAKTKPCEEQYGSTYRCVSVLTVLHQDWLNGKEYKCKVSNKALPAPIEKTISKAKGQPREPQVYTLPPSREEMTKNQVSLTCLVKGFYPSDIAVEWESNGQPENNYKTTPPVLDSDGSFFLYSKLTVDKSRWQQGNVFSCSVMHEALHNHYTQKSLSLSPGK

SEQ ID NO: 538 - protein, 5 aa, Artificial Sequence
  Synthetic peptide
SYGMH

SEQ ID NO: 539 - protein, 17 aa, Artificial Sequence
  Synthetic peptide
VISYEGSNEFYAESVKG

SEQ ID NO: 540 - protein, 20 aa, Artificial Sequence
  Synthetic peptide
GGEITMVRGVIGYYYYGMDV

SEQ ID NO: 541 - protein, 11 aa, Artificial Sequence
  Synthetic peptide
RASQSISSYLN

SEQ ID NO: 542 - protein, 7 aa, Artificial Sequence
  Synthetic peptide
AASSLQS

SEQ ID NO: 543 - protein, 9 aa, Artificial Sequence
  Synthetic peptide
LQHNSYPLT

SEQ ID NO: 544 - protein, 129 aa, Artificial Sequence
  Synthetic peptide
QVQLVESGGGVVQPGRSLRLSCAASGFTFSSYGMHWVRQAPGKGLEWVAVISYEGSNEFYAESVKGRFTISRDNSKNTLYLQMNSLRAEDTAVYYCARGGEITMVRGVIGYYYYGMDVWGQGTTVTVSS

SEQ ID NO: 545 - protein, 107 aa, Artificial Sequence
  Synthetic peptide
DIQMTQSPSSLSASVGDRVTITCRASQSISSYLNWYQQKPGKAPKLLIYAASSLQSGVPSRFSGSGSGTEFTLTISSLQPEDFATYYCLQHNSYPLTFGGGTKVEIK

SEQ ID NO: 546 - protein, 252 aa, Artificial Sequence
  Synthetic peptide
QVQLVESGGGVVQPGRSLRLSCAASGFTFSSYGMHWVRQAPGKGLEWVAVISYEGSNEFYAESVKGRFTISRDNSKNTLYLQMNSLRAEDTAVYYCARGGEITMVRGVIGYYYYGMDVWGQGTTVTVSSGGGGSGGGGSGGGGSDIQMTQSPSSLSASVGDRVTITCRASQSISSYLNWYQQKPGKAPKLLIYAASSLQSGVPSRFSGSGSGTEFTLTISSLQPEDFATYYCLQHNSYPLTFGGGTKVEIKS

SEQ ID NO: 547 - protein, 506 aa, Artificial Sequence
  Synthetic peptide
QVQLVESGGGVVQPGRSLRLSCAASGFTFSSYGMHWVRQAPGKGLEWVAVISYEGSNEFYAESVKGRFTISRDNSKNTLYLQMNSLRAEDTAVYYCARGGEITMVRGVIGYYYYGMDVWGQGTTVTVSSGGGGSGGGGSGGGGSDIQMTQSPSSLSASVGDRVTITCRASQSISSYLNWYQQKPGKAPKLLIYAASSLQSGVPSRFSGSGSGTEFTLTISSLQPEDFATYYCLQHNSYPLTFGGGTKVEIKSGGGGSEVQLVESGGGLVQPGGSLKLSCAASGFTFNKYAMNWVRQAPGKGLEWVARIRSKYNNYATYYADSVKDRFTISRDDSKNTAYLQMNNLKTEDTAVYYCVRHGNFGNSYISYWAYWGQGTLVTVSSGGGGSGGGGSGGGGSQTVVTQEPSLTVSPGGTVTLTCGSSTGAVTSGNYPNWVQQKPGQAPRGLIGGTKFLAPGTPARFSGSLLGGKAALTLSGVQPEDEAEYYCVLWYSNRWVFGGGTKLTVL

SEQ ID NO: 548 - protein, 994 aa, Artificial Sequence
  Synthetic peptide
QVQLVESGGGVVQPGRSLRLSCAASGFTFSSYGMHWVRQAPGKGLEWVAVISYEGSNEFYAESVKGRFTISRDNSKNTLYLQMNSLRAEDTAVYYCARGGEITMVRGVIGYYYYGMDVWGQGTTVTVSSGGGGSGGGGSGGGGSDIQMTQSPSSLSASVGDRVTITCRASQSISSYLNWYQQKPGKAPKLLIYAASSLQSGVPSRFSGSGSGTEFTLTISSLQPEDFATYYCLQHNSYPLTFGGGTKVEIKSGGGGSEVQLVESGGGLVQPGGSLKLSCAASGFTFNKYAMNWVRQAPGKGLEWVARIRSKYNNYATYYADSVKDRFTISRDDSKNTAYLQMNNLKTEDTAVYYCVRHGNFGNSYISYWAYWGQGTLVTVSSGGGGSGGGGSGGGGSQTVVTQEPSLTVSPGGTVTLTCGSSTGAVTSGNYPNWVQQKPGQAPRGLIGGTKFLAPGTPARFSGSLLGGKAALTLSGVQPEDEAEYYCVLWYSNRWVFGGGTKLTVLGGGGDKTHTCPPCPAPELLGGPSVFLFPPKPKDTLMISRTPEVTCVVVDVSHEDPEVKFNWYVDGVEVHNAKTKPCEEQYGSTYRCVSVLTVLHQDWLNGKEYKCKVSNKALPAPIEKTISKAKGQPREPQVYTLPPSREEMTKNQVSLTCLVKGFYPSDIAVEWESNGQPENNYKTTPPVLDSDGSFFLYSKLTVDKSRWQQGNVFSCSVMHEALHNHYTQKSLSLSPGKGGGGSGGGGSGGGGSGGGGSGGGGSGGGGSDKTHTCPPCPAPELLGGPSVFLFPPKPKDTLMISRTPEVTCVVVDVSHEDPEVKFNWYVDGVEVHNAKTKPCEEQYGSTYRCVSVLTVLHQDWLNGKEYKCKVSNKALPAPIEKTISKAKGQPREPQVYTLPPSREEMTKNQVSLTCLVKGFYPSDIAVEWESNGQPENNYKTTPPVLDSDGSFFLYSKLTVDKSRWQQGNVFSCSVMHEALHNHYTQKSLSLSPGK

SEQ ID NO: 549 - protein, 129 aa, Artificial Sequence
  Synthetic peptide
QVQLVESGGGVVQPGRSLRLSCAASGFTFSSYGMHWVRQAPGKCLEWVAVISYEGSNEFYAESVKGRFTISRDNSKNTLYLQMNSLRAEDTAVYYCARGGEITMVRGVIGYYYYGMDVWGQGTTVTVSS

SEQ ID NO: 550 - protein, 107 aa, Artificial Sequence
  Synthetic peptide
DIQMTQSPSSLSASVGDRVTITCRASQSISSYLNWYQQKPGKAPKLLIYAASSLQSGVPSRFSGSGSGTEFTLTISSLQPEDFATYYCLQHNSYPLTFGCGTKVEIK

SEQ ID NO: 551 - protein, 252 aa, Artificial Sequence
  Synthetic peptide
QVQLVESGGGVVQPGRSLRLSCAASGFTFSSYGMHWVRQAPGKCLEWVAVISYEGSNEFYAESVKGRFTISRDNSKNTLYLQMNSLRAEDTAVYYCARGGEITMVRGVIGYYYYGMDVWGQGTTVTVSSGGGGSGGGGSGGGGSDIQMTQSPSSLSASVGDRVTITCRASQSISSYLNWYQQKPGKAPKLLIYAASSLQSGVPSRFSGSGSGTEFTLTISSLQPEDFATYYCLQHNSYPLTFGCGTKVEIKS

SEQ ID NO: 552 - protein, 506 aa, Artificial Sequence
  Synthetic peptide
QVQLVESGGGVVQPGRSLRLSCAASGFTFSSYGMHWVRQAPGKCLEWVAVISYEGSNEFYAESVKGRFTISRDNSKNTLYLQMNSLRAEDTAVYYCARGGEITMVRGVIGYYYYGMDVWGQGTTVTVSSGGGGSGGGGSGGGGSDIQMTQSPSSLSASVGDRVTITCRASQSISSYLNWYQQKPGKAPKLLIYAASSLQSGVPSRFSGSGSGTEFTLTISSLQPEDFATYYCLQHNSYPLTFGCGTKVEIKSGGGGSEVQLVESGGGLVQPGGSLKLSCAASGFTFNKYAMNWVRQAPGKGLEWVARIRSKYNNYATYYADSVKDRFTISRDDSKNTAYLQMNNLKTEDTAVYYCVRHGNFGNSYISYWAYWGQGTLVTVSSGGGGSGGGGSGGGGSQTVVTQEPSLTVSPGGTVTLTCGSSTGAVTSGNYPNWVQQKPGQAPRGLIGGTKFLAPGTPARFSGSLLGGKAALTLSGVQPEDEAEYYCVLWYSNRWVFGGGTKLTVL

SEQ ID NO: 553 - protein, 994 aa, Artificial Sequence
  Synthetic peptide
QVQLVESGGGVVQPGRSLRLSCAASGFTFSSYGMHWVRQAPGKCLEWVAVISYEGSNEFYAESVKGRFTISRDNSKNTLYLQMNSLRAEDTAVYYCARGGEITMVRGVIGYYYYGMDVWGQGTTVTVSSGGGGSGGGGSGGGGSDIQMTQSPSSLSASVGDRVTITCRASQSISSYLNWYQQKPGKAPKLLIYAASSLQSGVPSRFSGSGSGTEFTLTISSLQPEDFATYYCLQHNSYPLTFGCGTKVEIKSGGGGSEVQLVESGGGLVQPGGSLKLSCAASGFTFNKYAMNWVRQAPGKGLEWVARIRSKYNNYATYYADSVKDRFTISRDDSKNTAYLQMNNLKTEDTAVYYCVRHGNFGNSYISYWAYWGQGTLVTVSSGGGGSGGGGSGGGGSQTVVTQEPSLTVSPGGTVTLTCGSSTGAVTSGNYPNWVQQKPGQAPRGLIGGTKFLAPGTPARFSGSLLGGKAALTLSGVQPEDEAEYYCVLWYSNRWVFGGGTKLTVLGGGGDKTHTCPPCPAPELLGGPSVFLFPPKPKDTLMISRTPEVTCVVVDVSHEDPEVKFNWYVDGVEVHNAKTKPCEEQYGSTYRCVSVLTVLHQDWLNGKEYKCKVSNKALPAPIEKTISKAKGQPREPQVYTLPPSREEMTKNQVSLTCLVKGFYPSDIAVEWESNGQPENNYKTTPPVLDSDGSFFLYSKLTVDKSRWQQGNVFSCSVMHEALHNHYTQKSLSLSPGKGGGGSGGGGSGGGGSGGGGSGGGGSGGGGSDKTHTCPPCPAPELLGGPSVFLFPPKPKDTLMISRTPEVTCVVVDVSHEDPEVKFNWYVDGVEVHNAKTKPCEEQYGSTYRCVSVLTVLHQDWLNGKEYKCKVSNKALPAPIEKTISKAKGQPREPQVYTLPPSREEMTKNQVSLTCLVKGFYPSDIAVEWESNGQPENNYKTTPPVLDSDGSFFLYSKLTVDKSRWQQGNVFSCSVMHEALHNHYTQKSLSLSPGK

SEQ ID NO: 554 - protein, 987 aa, Artificial Sequence
  Synthetic peptide
QVTLKESGPALVKPTETLTLTCTVSGFSLSNARMGVSWIRQPPGKALEWLANIFSNDEKSYSTSLKSRLTISKGTSKSQVVLTMTNMDPEDTATYYCARIVGYGSGWYGYFDYWGQGTLVTVSSGGGGSGGGGSGGGGSDIQMTQSPSSLSASVGDRVTITCRASQGIRNDLGWYQQKPGKAPQRLIYAASSLQSGVPSRFSGSGSGTEFTLTISSLQPEDFATYYCLQHNSYPLTFGGGTKVEIKSGGGGSEVQLVESGGGLVQPGGSLKLSCAASGFTFNKYAMNWVRQAPGKGLEWVARIRSKYNNYATYYADSVKDRFTISRDDSKNTAYLQMNNLKTEDTAVYYCVRHGNFGNSYISYWAYWGQGTLVTVSSGGGGSGGGGSGGGGSQTVVTQEPSLTVSPGGTVTLTCGSSTGAVTSGNYPNWVQQKPGQAPRGLIGGTKFLAPGTPARFSGSLLGGKAALTLSGVQPEDEAEYYCVLWYSNRWVFGGGTKLTVLGGGGDKTHTCPPCPAPELLGGPSVFLFPPKPKDTLMISRTPEVTCVVVDVSHEDPEVKFNWYVDGVEVHNAKTKPCEEQYGSTYRCVSVLTVLHQDWLNGKEYKCKVSNKALPAPIEKTISKAKGQPREPQVYTLPPSREEMTKNQVSLTCLVKGFYPSDIAVEWESNGQPENNYKTTPPVLDSDGSFFLYSKLTVDKSRWQQGNVFSCSVMHEALHNHYTQKSLSLSPGGGGSGGGGSGGGGSGGGGSGGGGSGGGGSDKTHTCPPCPAPELLGGPSVFLFPPKPKDTLMISRTPEVTCVVVDVSHEDPEVKFNWYVDGVEVHNAKTKPCEEQYGSTYRCVSVLTVLHQDWLNGKEYKCKVSNKALPAPIEKTISKAKGQPREPQVYTLPPSREEMTKNQVSLTCLVKGFYPSDIAVEWESNGQPENNYKTTPPVLDSDGSFFLYSKLTVDKSRWQQGNVFSCSVMHEALHNHYTQKSLSLSPGK

SEQ ID NO: 555 - protein, 987 aa, Artificial Sequence
  Synthetic peptide
QVTLKESGPALVKPTETLTLTCTVSGFSLSNARMGVSWIRQPPGKCLEWLANIFSNDEKSYSTSLKSRLTISKGTSKSQVVLTMTNMDPEDTATYYCARIVGYGSGWYGYFDYWGQGTLVTVSSGGGGSGGGGSGGGGSDIQMTQSPSSLSASVGDRVTITCRASQGIRNDLGWYQQKPGKAPQRLIYAASSLQSGVPSRFSGSGSGTEFTLTISSLQPEDFATYYCLQHNSYPLTFGCGTKVEIKSGGGGSEVQLVESGGGLVQPGGSLKLSCAASGFTFNKYAMNWVRQAPGKGLEWVARIRSKYNNYATYYADSVKDRFTISRDDSKNTAYLQMNNLKTEDTAVYYCVRHGNFGNSYISYWAYWGQGTLVTVSSGGGGSGGGGSGGGGSQTVVTQEPSLTVSPGGTVTLTCGSSTGAVTSGNYPNWVQQKPGQAPRGLIGGTKFLAPGTPARFSGSLLGGKAALTLSGVQPEDEAEYYCVLWYSNRWVFGGGTKLTVLGGGGDKTHTCPPCPAPELLGGPSVFLFPPKPKDTLMISRTPEVTCVVVDVSHEDPEVKFNWYVDGVEVHNAKTKPCEEQYGSTYRCVSVLTVLHQDWLNGKEYKCKVSNKALPAPIEKTISKAKGQPREPQVYTLPPSREEMTKNQVSLTCLVKGFYPSDIAVEWESNGQPENNYKTTPPVLDSDGSFFLYSKLTVDKSRWQQGNVFSCSVMHEALHNHYTQKSLSLSPGGGGSGGGGSGGGGSGGGGSGGGGSGGGGSDKTHTCPPCPAPELLGGPSVFLFPPKPKDTLMISRTPEVTCVVVDVSHEDPEVKFNWYVDGVEVHNAKTKPCEEQYGSTYRCVSVLTVLHQDWLNGKEYKCKVSNKALPAPIEKTISKAKGQPREPQVYTLPPSREEMTKNQVSLTCLVKGFYPSDIAVEWESNGQPENNYKTTPPVLDSDGSFFLYSKLTVDKSRWQQGNVFSCSVMHEALHNHYTQKSLSLSPGK

SEQ ID NO: 556 - protein, 987 aa, Artificial Sequence
  Synthetic peptide
QVTLKESGPTLVKPTETLTLTCTLSGFSLNNARMGVSWIRQPPGKALEWLAHIFSNDEKSYSTSLKNRLTISKDSSKTQVVLTMTNVDPVDTATYYCARIVGYGSGWYGFFDYWGQGTLVTVSSGGGGSGGGGSGGGGSDIQMTQSPSSLSASVGDRVTITCRASQGIRNDLGWYQQKPGKAPKRLIYAASTLQSGVPSRFSGSGSGTEFTLTISSLQPEDFATYYCLQHNSYPLTFGGGTKVEIKSGGGGSEVQLVESGGGLVQPGGSLKLSCAASGFTFNKYAMNWVRQAPGKGLEWVARIRSKYNNYATYYADSVKDRFTISRDDSKNTAYLQMNNLKTEDTAVYYCVRHGNFGNSYISYWAYWGQGTLVTVSSGGGGSGGGGSGGGGSQTVVTQEPSLTVSPGGTVTLTCGSSTGAVTSGNYPNWVQQKPGQAPRGLIGGTKFLAPGTPARFSGSLLGGKAALTLSGVQPEDEAEYYCVLWYSNRWVFGGGTKLTVLGGGGDKTHTCPPCPAPELLGGPSVFLFPPKPKDTLMISRTPEVTCVVVDVSHEDPEVKFNWYVDGVEVHNAKTKPCEEQYGSTYRCVSVLTVLHQDWLNGKEYKCKVSNKALPAPIEKTISKAKGQPREPQVYTLPPSREEMTKNQVSLTCLVKGFYPSDIAVEWESNGQPENNYKTTPPVLDSDGSFFLYSKLTVDKSRWQQGNVFSCSVMHEALHNHYTQKSLSLSPGGGGSGGGGSGGGGSGGGGSGGGGSGGGGSDKTHTCPPCPAPELLGGPSVFLFPPKPKDTLMISRTPEVTCVVVDVSHEDPEVKFNWYVDGVEVHNAKTKPCEEQYGSTYRCVSVLTVLHQDWLNGKEYKCKVSNKALPAPIEKTISKAKGQPREPQVYTLPPSREEMTKNQVSLTCLVKGFYPSDIAVEWESNGQPENNYKTTPPVLDSDGSFFLYSKLTVDKSRWQQGNVFSCSVMHEALHNHYTQKSLSLSPGK

SEQ ID NO: 557 - protein, 987 aa, Artificial Sequence
  Synthetic peptide
QVTLKESGPTLVKPTETLTLTCTLSGFSLNNARMGVSWIRQPPGKCLEWLAHIFSNDEKSYSTSLKNRLTISKDSSKTQVVLTMTNVDPVDTATYYCARIVGYGSGWYGFFDYWGQGTLVTVSSGGGGSGGGGSGGGGSDIQMTQSPSSLSASVGDRVTITCRASQGIRNDLGWYQQKPGKAPKRLIYAASTLQSGVPSRFSGSGSGTEFTLTISSLQPEDFATYYCLQHNSYPLTFGCGTKVEIKSGGGGSEVQLVESGGGLVQPGGSLKLSCAASGFTFNKYAMNWVRQAPGKGLEWVARIRSKYNNYATYYADSVKDRFTISRDDSKNTAYLQMNNLKTEDTAVYYCVRHGNFGNSYISYWAYWGQGTLVTVSSGGGGSGGGGSGGGGSQTVVTQEPSLTVSPGGTVTLTCGSSTGAVTSGNYPNWVQQKPGQAPRGLIGGTKFLAPGTPARFSGSLLGGKAALTLSGVQPEDEAEYYCVLWYSNRWVFGGGTKLTVLGGGGDKTHTCPPCPAPELLGGPSVFLFPPKPKDTLMISRTPEVTCVVVDVSHEDPEVKFNWYVDGVEVHNAKTKPCEEQYGSTYRCVSVLTVLHQDWLNGKEYKCKVSNKALPAPIEKTISKAKGQPREPQVYTLPPSREEMTKNQVSLTCLVKGFYPSDIAVEWESNGQPENNYKTTPPVLDSDGSFFLYSKLTVDKSRWQQGNVFSCSVMHEALHNHYTQKSLSLSPGGGGSGGGGSGGGGSGGGGSGGGGSGGGGSDKTHTCPPCPAPELLGGPSVFLFPPKPKDTLMISRTPEVTCVVVDVSHEDPEVKFNWYVDGVEVHNAKTKPCEEQYGSTYRCVSVLTVLHQDWLNGKEYKCKVSNKALPAPIEKTISKAKGQPREPQVYTLPPSREEMTKNQVSLTCLVKGFYPSDIAVEWESNGQPENNYKTTPPVLDSDGSFFLYSKLTVDKSRWQQGNVFSCSVMHEALHNHYTQKSLSLSPGK

SEQ ID NO: 558 - protein, 987 aa, Artificial Sequence
  Synthetic peptide
QVTLKESGPALVKPTETLTLTCTLSGFSLNNARMAVSWIRQPPGKTLEWLAHIFSNDEKSYSTSLKSRLTISKDTSKGQVVLTMTNMDPVDTATYYCARIVGYGSGWYGYFDYWGQGTLVTVSSGGGGSGGGGSGGGGSDIQMTQSPSSLSASVGDRVTITCRASQDIRNDLGWYQQKPGKAPKRLIYAASTLQSGVPSRFSGSGSGTEFTLTISSLQPEDFATYYCLQHNSYPLTFGGGTKVEIKSGGGGSEVQLVESGGGLVQPGGSLKLSCAASGFTFNKYAMNWVRQAPGKGLEWVARIRSKYNNYATYYADSVKDRFTISRDDSKNTAYLQMNNLKTEDTAVYYCVRHGNFGNSYISYWAYWGQGTLVTVSSGGGGSGGGGSGGGGSQTVVTQEPSLTVSPGGTVTLTCGSSTGAVTSGNYPNWVQQKPGQAPRGLIGGTKFLAPGTPARFSGSLLGGKAALTLSGVQPEDEAEYYCVLWYSNRWVFGGGTKLTVLGGGGDKTHTCPPCPAPELLGGPSVFLFPPKPKDTLMISRTPEVTCVVVDVSHEDPEVKFNWYVDGVEVHNAKTKPCEEQYGSTYRCVSVLTVLHQDWLNGKEYKCKVSNKALPAPIEKTISKAKGQPREPQVYTLPPSREEMTKNQVSLTCLVKGFYPSDIAVEWESNGQPENNYKTTPPVLDSDGSFFLYSKLTVDKSRWQQGNVFSCSVMHEALHNHYTQKSLSLSPGGGGSGGGGSGGGGSGGGGSGGGGSGGGGSDKTHTCPPCPAPELLGGPSVFLFPPKPKDTLMISRTPEVTCVVVDVSHEDPEVKFNWYVDGVEVHNAKTKPCEEQYGSTYRCVSVLTVLHQDWLNGKEYKCKVSNKALPAPIEKTISKAKGQPREPQVYTLPPSREEMTKNQVSLTCLVKGFYPSDIAVEWESNGQPENNYKTTPPVLDSDGSFFLYSKLTVDKSRWQQGNVFSCSVMHEALHNHYTQKSLSLSPGK

SEQ ID NO: 559 - protein, 987 aa, Artificial Sequence
  Synthetic peptide
QVTLKESGPALVKPTETLTLTCTLSGFSLNNARMAVSWIRQPPGKCLEWLAHIFSNDEKSYSTSLKSRLTISKDTSKGQVVLTMTNMDPVDTATYYCARIVGYGSGWYGYFDYWGQGTLVTVSSGGGGSGGGGSGGGGSDIQMTQSPSSLSASVGDRVTITCRASQDIRNDLGWYQQKPGKAPKRLIYAASTLQSGVPSRFSGSGSGTEFTLTISSLQPEDFATYYCLQHNSYPLTFGCGTKVEIKSGGGGSEVQLVESGGGLVQPGGSLKLSCAASGFTFNKYAMNWVRQAPGKGLEWVARIRSKYNNYATYYADSVKDRFTISRDDSKNTAYLQMNNLKTEDTAVYYCVRHGNFGNSYISYWAYWGQGTLVTVSSGGGGSGGGGSGGGGSQTVVTQEPSLTVSPGGTVTLTCGSSTGAVTSGNYPNWVQQKPGQAPRGLIGGTKFLAPGTPARFSGSLLGGKAALTLSGVQPEDEAEYYCVLWYSNRWVFGGGTKLTVLGGGGDKTHTCPPCPAPELLGGPSVFLFPPKPKDTLMISRTPEVTCVVVDVSHEDPEVKFNWYVDGVEVHNAKTKPCEEQYGSTYRCVSVLTVLHQDWLNGKEYKCKVSNKALPAPIEKTISKAKGQPREPQVYTLPPSREEMTKNQVSLTCLVKGFYPSDIAVEWESNGQPENNYKTTPPVLDSDGSFFLYSKLTVDKSRWQQGNVFSCSVMHEALHNHYTQKSLSLSPGGGGSGGGGSGGGGSGGGGSGGGGSGGGGSDKTHTCPPCPAPELLGGPSVFLFPPKPKDTLMISRTPEVTCVVVDVSHEDPEVKFNWYVDGVEVHNAKTKPCEEQYGSTYRCVSVLTVLHQDWLNGKEYKCKVSNKALPAPIEKTISKAKGQPREPQVYTLPPSREEMTKNQVSLTCLVKGFYPSDIAVEWESNGQPENNYKTTPPVLDSDGSFFLYSKLTVDKSRWQQGNVFSCSVMHEALHNHYTQKSLSLSPGK

SEQ ID NO: 560 - protein, 987 aa, Artificial Sequence
  Synthetic peptide
QVTLKESGPALVKPTETLTLTCTLSGFSLNNAKMGVSWIRQPPGKALEWLAHIFSNDEKSYSTSLKSRLTISKDTSKGQVVLTMTNMDPVDTATYYCARIVGYGSGWYGYFDYWGQGTLVTVSSGGGGSGGGGSGGGGSDIQMTQSPSSLSASVGDRVTITCRASQDIRDDLGWYQQKPGNAPKRLIYGASTLQSGVPSRFSGSGSGTEFTLTISSLQPEDFATYYCLQHNSYPLTFGGGTKVDIKSGGGGSEVQLVESGGGLVQPGGSLKLSCAASGFTFNKYAMNWVRQAPGKGLEWVARIRSKYNNYATYYADSVKDRFTISRDDSKNTAYLQMNNLKTEDTAVYYCVRHGNFGNSYISYWAYWGQGTLVTVSSGGGGSGGGGSGGGGSQTVVTQEPSLTVSPGGTVTLTCGSSTGAVTSGNYPNWVQQKPGQAPRGLIGGTKFLAPGTPARFSGSLLGGKAALTLSGVQPEDEAEYYCVLWYSNRWVFGGGTKLTVLGGGGDKTHTCPPCPAPELLGGPSVFLFPPKPKDTLMISRTPEVTCVVVDVSHEDPEVKFNWYVDGVEVHNAKTKPCEEQYGSTYRCVSVLTVLHQDWLNGKEYKCKVSNKALPAPIEKTISKAKGQPREPQVYTLPPSREEMTKNQVSLTCLVKGFYPSDIAVEWESNGQPENNYKTTPPVLDSDGSFFLYSKLTVDKSRWQQGNVFSCSVMHEALHNHYTQKSLSLSPGGGGSGGGGSGGGGSGGGGSGGGGSGGGGSDKTHTCPPCPAPELLGGPSVFLFPPKPKDTLMISRTPEVTCVVVDVSHEDPEVKFNWYVDGVEVHNAKTKPCEEQYGSTYRCVSVLTVLHQDWLNGKEYKCKVSNKALPAPIEKTISKAKGQPREPQVYTLPPSREEMTKNQVSLTCLVKGFYPSDIAVEWESNGQPENNYKTTPPVLDSDGSFFLYSKLTVDKSRWQQGNVFSCSVMHEALHNHYTQKSLSLSPGK

SEQ ID NO: 561 - protein, 987 aa, Artificial Sequence
  Synthetic peptide
QVTLKESGPALVKPTETLTLTCTLSGFSLNNAKMGVSWIRQPPGKCLEWLAHIFSNDEKSYSTSLKSRLTISKDTSKGQVVLTMTNMDPVDTATYYCARIVGYGSGWYGYFDYWGQGTLVTVSSGGGGSGGGGSGGGGSDIQMTQSPSSLSASVGDRVTITCRASQDIRDDLGWYQQKPGNAPKRLIYGASTLQSGVPSRFSGSGSGTEFTLTISSLQPEDFATYYCLQHNSYPLTFGCGTKVDIKSGGGGSEVQLVESGGGLVQPGGSLKLSCAASGFTFNKYAMNWVRQAPGKGLEWVARIRSKYNNYATYYADSVKDRFTISRDDSKNTAYLQMNNLKTEDTAVYYCVRHGNFGNSYISYWAYWGQGTLVTVSSGGGGSGGGGSGGGGSQTVVTQEPSLTVSPGGTVTLTCGSSTGAVTSGNYPNWVQQKPGQAPRGLIGGTKFLAPGTPARFSGSLLGGKAALTLSGVQPEDEAEYYCVLWYSNRWVFGGGTKLTVLGGGGDKTHTCPPCPAPELLGGPSVFLFPPKPKDTLMISRTPEVTCVVVDVSHEDPEVKFNWYVDGVEVHNAKTKPCEEQYGSTYRCVSVLTVLHQDWLNGKEYKCKVSNKALPAPIEKTISKAKGQPREPQVYTLPPSREEMTKNQVSLTCLVKGFYPSDIAVEWESNGQPENNYKTTPPVLDSDGSFFLYSKLTVDKSRWQQGNVFSCSVMHEALHNHYTQKSLSLSPGGGGSGGGGSGGGGSGGGGSGGGGSGGGGSDKTHTCPPCPAPELLGGPSVFLFPPKPKDTLMISRTPEVTCVVVDVSHEDPEVKFNWYVDGVEVHNAKTKPCEEQYGSTYRCVSVLTVLHQDWLNGKEYKCKVSNKALPAPIEKTISKAKGQPREPQVYTLPPSREEMTKNQVSLTCLVKGFYPSDIAVEWESNGQPENNYKTTPPVLDSDGSFFLYSKLTVDKSRWQQGNVFSCSVMHEALHNHYTQKSLSLSPGK

SEQ ID NO: 562 - protein, 987 aa, Artificial Sequence
  Synthetic peptide
QVTLKESGPVLVKPTETLTLTCTVSGFSLRNARMAVSWIRQPPGKTLEWLAHIFSNDEKSYSTSLKSRLTISKDTSKSQVVLTMTNMDPVDTATYYCARIVGYGSGWYGYFDYWGQGTLVTVSSGGGGSGGGGSGGGGSDIQMTQSPSSVSASVGDRVTITCRASQDIRYDLAWYQQKPGKAPKRLIYAASSLQSGVPSRFSGSGSGTEFTLTISSLQPEDFATYYCLQHNFYPLTFGGGTKVEIKSGGGGSEVQLVESGGGLVQPGGSLKLSCAASGFTFNKYAMNWVRQAPGKGLEWVARIRSKYNNYATYYADSVKDRFTISRDDSKNTAYLQMNNLKTEDTAVYYCVRHGNFGNSYISYWAYWGQGTLVTVSSGGGGSGGGGSGGGGSQTVVTQEPSLTVSPGGTVTLTCGSSTGAVTSGNYPNWVQQKPGQAPRGLIGGTKFLAPGTPARFSGSLLGGKAALTLSGVQPEDEAEYYCVLWYSNRWVFGGGTKLTVLGGGGDKTHTCPPCPAPELLGGPSVFLFPPKPKDTLMISRTPEVTCVVVDVSHEDPEVKFNWYVDGVEVHNAKTKPCEEQYGSTYRCVSVLTVLHQDWLNGKEYKCKVSNKALPAPIEKTISKAKGQPREPQVYTLPPSREEMTKNQVSLTCLVKGFYPSDIAVEWESNGQPENNYKTTPPVLDSDGSFFLYSKLTVDKSRWQQGNVFSCSVMHEALHNHYTQKSLSLSPGGGGSGGGGSGGGGSGGGGSGGGGSGGGGSDKTHTCPPCPAPELLGGPSVFLFPPKPKDTLMISRTPEVTCVVVDVSHEDPEVKFNWYVDGVEVHNAKTKPCEEQYGSTYRCVSVLTVLHQDWLNGKEYKCKVSNKALPAPIEKTISKAKGQPREPQVYTLPPSREEMTKNQVSLTCLVKGFYPSDIAVEWESNGQPENNYKTTPPVLDSDGSFFLYSKLTVDKSRWQQGNVFSCSVMHEALHNHYTQKSLSLSPGK

SEQ ID NO: 563 - protein, 987 aa, Artificial Sequence
  Synthetic peptide
QVTLKESGPVLVKPTETLTLTCTVSGFSLRNARMAVSWIRQPPGKCLEWLAHIFSNDEKSYSTSLKSRLTISKDTSKSQVVLTMTNMDPVDTATYYCARIVGYGSGWYGYFDYWGQGTLVTVSSGGGGSGGGGSGGGGSDIQMTQSPSSVSASVGDRVTITCRASQDIRYDLAWYQQKPGKAPKRLIYAASSLQSGVPSRFSGSGSGTEFTLTISSLQPEDFATYYCLQHNFYPLTFGCGTKVEIKSGGGGSEVQLVESGGGLVQPGGSLKLSCAASGFTFNKYAMNWVRQAPGKGLEWVARIRSKYNNYATYYADSVKDRFTISRDDSKNTAYLQMNNLKTEDTAVYYCVRHGNFGNSYISYWAYWGQGTLVTVSSGGGGSGGGGSGGGGSQTVVTQEPSLTVSPGGTVTLTCGSSTGAVTSGNYPNWVQQKPGQAPRGLIGGTKFLAPGTPARFSGSLLGGKAALTLSGVQPEDEAEYYCVLWYSNRWVFGGGTKLTVLGGGGDKTHTCPPCPAPELLGGPSVFLFPPKPKDTLMISRTPEVTCVVVDVSHEDPEVKFNWYVDGVEVHNAKTKPCEEQYGSTYRCVSVLTVLHQDWLNGKEYKCKVSNKALPAPIEKTISKAKGQPREPQVYTLPPSREEMTKNQVSLTCLVKGFYPSDIAVEWESNGQPENNYKTTPPVLDSDGSFFLYSKLTVDKSRWQQGNVFSCSVMHEALHNHYTQKSLSLSPGGGGSGGGGSGGGGSGGGGSGGGGSGGGGSDKTHTCPPCPAPELLGGPSVFLFPPKPKDTLMISRTPEVTCVVVDVSHEDPEVKFNWYVDGVEVHNAKTKPCEEQYGSTYRCVSVLTVLHQDWLNGKEYKCKVSNKALPAPIEKTISKAKGQPREPQVYTLPPSREEMTKNQVSLTCLVKGFYPSDIAVEWESNGQPENNYKTTPPVLDSDGSFFLYSKLTVDKSRWQQGNVFSCSVMHEALHNHYTQKSLSLSPGK

SEQ ID NO: 564 - protein, 987 aa, Artificial Sequence
  Synthetic peptide
QVTLKESGPVLVKPTQTLTLTCTFSGFSLSNARMGVSWIRQPPGKALEWLAHIFSNDEKSFSTSLKNRLTISKDTSKSQVVLTMTNMDPVDTATYYCARMVGYGSGWYAYFDYWGQGTQVTVSSGGGGSGGGGSGGGGSDIQMTQSPSSLSASVGDRVTITCRASQSISSYLNWYQQKPGKAPKLLIYAASSLQSGVPSRFSGSGSGTDFTLTISSLQPEDFATYYCLQHNSYPLTFGGGTKVEIKSGGGGSEVQLVESGGGLVQPGGSLKLSCAASGFTFNKYAMNWVRQAPGKGLEWVARIRSKYNNYATYYADSVKDRFTISRDDSKNTAYLQMNNLKTEDTAVYYCVRHGNFGNSYISYWAYWGQGTLVTVSSGGGGSGGGGSGGGGSQTVVTQEPSLTVSPGGTVTLTCGSSTGAVTSGNYPNWVQQKPGQAPRGLIGGTKFLAPGTPARFSGSLLGGKAALTLSGVQPEDEAEYYCVLWYSNRWVFGGGTKLTVLGGGGDKTHTCPPCPAPELLGGPSVFLFPPKPKDTLMISRTPEVTCVVVDVSHEDPEVKFNWYVDGVEVHNAKTKPCEEQYGSTYRCVSVLTVLHQDWLNGKEYKCKVSNKALPAPIEKTISKAKGQPREPQVYTLPPSREEMTKNQVSLTCLVKGFYPSDIAVEWESNGQPENNYKTTPPVLDSDGSFFLYSKLTVDKSRWQQGNVFSCSVMHEALHNHYTQKSLSLSPGGGGSGGGGSGGGGSGGGGSGGGGSGGGGSDKTHTCPPCPAPELLGGPSVFLFPPKPKDTLMISRTPEVTCVVVDVSHEDPEVKFNWYVDGVEVHNAKTKPCEEQYGSTYRCVSVLTVLHQDWLNGKEYKCKVSNKALPAPIEKTISKAKGQPREPQVYTLPPSREEMTKNQVSLTCLVKGFYPSDIAVEWESNGQPENNYKTTPPVLDSDGSFFLYSKLTVDKSRWQQGNVFSCSVMHEALHNHYTQKSLSLSPGK

SEQ ID NO: 565 - protein, 987 aa, Artificial Sequence
  Synthetic peptide
QVTLKESGPVLVKPTQTLTLTCTFSGFSLSNARMGVSWIRQPPGKCLEWLAHIFSNDEKSFSTSLKNRLTISKDTSKSQVVLTMTNMDPVDTATYYCARMVGYGSGWYAYFDYWGQGTQVTVSSGGGGSGGGGSGGGGSDIQMTQSPSSLSASVGDRVTITCRASQSISSYLNWYQQKPGKAPKLLIYAASSLQSGVPSRFSGSGSGTDFTLTISSLQPEDFATYYCLQHNSYPLTFGCGTKVEIKSGGGGSEVQLVESGGGLVQPGGSLKLSCAASGFTFNKYAMNWVRQAPGKGLEWVARIRSKYNNYATYYADSVKDRFTISRDDSKNTAYLQMNNLKTEDTAVYYCVRHGNFGNSYISYWAYWGQGTLVTVSSGGGGSGGGGSGGGGSQTVVTQEPSLTVSPGGTVTLTCGSSTGAVTSGNYPNWVQQKPGQAPRGLIGGTKFLAPGTPARFSGSLLGGKAALTLSGVQPEDEAEYYCVLWYSNRWVFGGGTKLTVLGGGGDKTHTCPPCPAPELLGGPSVFLFPPKPKDTLMISRTPEVTCVVVDVSHEDPEVKFNWYVDGVEVHNAKTKPCEEQYGSTYRCVSVLTVLHQDWLNGKEYKCKVSNKALPAPIEKTISKAKGQPREPQVYTLPPSREEMTKNQVSLTCLVKGFYPSDIAVEWESNGQPENNYKTTPPVLDSDGSFFLYSKLTVDKSRWQQGNVFSCSVMHEALHNHYTQKSLSLSPGGGGSGGGGSGGGGSGGGGSGGGGSGGGGSDKTHTCPPCPAPELLGGPSVFLFPPKPKDTLMISRTPEVTCVVVDVSHEDPEVKFNWYVDGVEVHNAKTKPCEEQYGSTYRCVSVLTVLHQDWLNGKEYKCKVSNKALPAPIEKTISKAKGQPREPQVYTLPPSREEMTKNQVSLTCLVKGFYPSDIAVEWESNGQPENNYKTTPPVLDSDGSFFLYSKLTVDKSRWQQGNVFSCSVMHEALHNHYTQKSLSLSPGK

SEQ ID NO: 566 - protein, 987 aa, Artificial Sequence
  Synthetic peptide
QVTLKESGPTLVKPTETLTLTCTVSGFSLNNARMGVSWIRQPPGKALEWLAHIFSNDEKSYSTSLKNRLTISKDSSKTQVVLTMTNVDPVDTATYYCARIVGYGTGWFGYFDYWGQGTQVTVSSGGGGSGGGGSGGGGSDIQMTQSPSSLSASVGDRVTITCRASQDIRTDLAWYQQKPGKAPKRLIYAASSLQSGVPSRFSGSGSGTEFTLTISSLQPEDFATYYCLQHNRYPLTFGGGTKVDIKSGGGGSEVQLVESGGGLVQPGGSLKLSCAASGFTFNKYAMNWVRQAPGKGLEWVARIRSKYNNYATYYADSVKDRFTISRDDSKNTAYLQMNNLKTEDTAVYYCVRHGNFGNSYISYWAYWGQGTLVTVSSGGGGSGGGGSGGGGSQTVVTQEPSLTVSPGGTVTLTCGSSTGAVTSGNYPNWVQQKPGQAPRGLIGGTKFLAPGTPARFSGSLLGGKAALTLSGVQPEDEAEYYCVLWYSNRWVFGGGTKLTVLGGGGDKTHTCPPCPAPELLGGPSVFLFPPKPKDTLMISRTPEVTCVVVDVSHEDPEVKFNWYVDGVEVHNAKTKPCEEQYGSTYRCVSVLTVLHQDWLNGKEYKCKVSNKALPAPIEKTISKAKGQPREPQVYTLPPSREEMTKNQVSLTCLVKGFYPSDIAVEWESNGQPENNYKTTPPVLDSDGSFFLYSKLTVDKSRWQQGNVFSCSVMHEALHNHYTQKSLSLSPGGGGSGGGGSGGGGSGGGGSGGGGSGGGGSDKTHTCPPCPAPELLGGPSVFLFPPKPKDTLMISRTPEVTCVVVDVSHEDPEVKFNWYVDGVEVHNAKTKPCEEQYGSTYRCVSVLTVLHQDWLNGKEYKCKVSNKALPAPIEKTISKAKGQPREPQVYTLPPSREEMTKNQVSLTCLVKGFYPSDIAVEWESNGQPENNYKTTPPVLDSDGSFFLYSKLTVDKSRWQQGNVFSCSVMHEALHNHYTQKSLSLSPGK

SEQ ID NO: 567 - protein, 987 aa, Artificial Sequence
  Synthetic peptide
QVTLKESGPTLVKPTETLTLTCTVSGFSLNNARMGVSWIRQPPGKCLEWLAHIFSNDEKSYSTSLKNRLTISKDSSKTQVVLTMTNVDPVDTATYYCARIVGYGTGWFGYFDYWGQGTQVTVSSGGGGSGGGGSGGGGSDIQMTQSPSSLSASVGDRVTITCRASQDIRTDLAWYQQKPGKAPKRLIYAASSLQSGVPSRFSGSGSGTEFTLTISSLQPEDFATYYCLQHNRYPLTFGCGTKVDIKSGGGGSEVQLVESGGGLVQPGGSLKLSCAASGFTFNKYAMNWVRQAPGKGLEWVARIRSKYNNYATYYADSVKDRFTISRDDSKNTAYLQMNNLKTEDTAVYYCVRHGNFGNSYISYWAYWGQGTLVTVSSGGGGSGGGGSGGGGSQTVVTQEPSLTVSPGGTVTLTCGSSTGAVTSGNYPNWVQQKPGQAPRGLIGGTKFLAPGTPARFSGSLLGGKAALTLSGVQPEDEAEYYCVLWYSNRWVFGGGTKLTVLGGGGDKTHTCPPCPAPELLGGPSVFLFPPKPKDTLMISRTPEVTCVVVDVSHEDPEVKFNWYVDGVEVHNAKTKPCEEQYGSTYRCVSVLTVLHQDWLNGKEYKCKVSNKALPAPIEKTISKAKGQPREPQVYTLPPSREEMTKNQVSLTCLVKGFYPSDIAVEWESNGQPENNYKTTPPVLDSDGSFFLYSKLTVDKSRWQQGNVFSCSVMHEALHNHYTQKSLSLSPGGGGSGGGGSGGGGSGGGGSGGGGSGGGGSDKTHTCPPCPAPELLGGPSVFLFPPKPKDTLMISRTPEVTCVVVDVSHEDPEVKFNWYVDGVEVHNAKTKPCEEQYGSTYRCVSVLTVLHQDWLNGKEYKCKVSNKALPAPIEKTISKAKGQPREPQVYTLPPSREEMTKNQVSLTCLVKGFYPSDIAVEWESNGQPENNYKTTPPVLDSDGSFFLYSKLTVDKSRWQQGNVFSCSVMHEALHNHYTQKSLSLSPGK

SEQ ID NO: 568 - protein, 987 aa, Artificial Sequence
  Synthetic peptide
QVTLKESGPALVKPTETLTLTCTLSGFSLNNARMAVSWIRQPPGKTLEWLAHIFSNDEKSYSTSLKSRLTISKDTSKSQVVLTMTNMDPEDTATYYCARIVGYGTGWYGFFDYWGQGILVTVSSGGGGSGGGGSGGGGSDIQMTQSPSSLSASVGDRVTITCRASQGIRNDLAWYQQKPGKAPKRLIYAASSLQSGVPSRFSGSGSGTEFTLTISSLQPEDFATYYCLQHNSYPLTFGGGTKVEIKSGGGGSEVQLVESGGGLVQPGGSLKLSCAASGFTFNKYAMNWVRQAPGKGLEWVARIRSKYNNYATYYADSVKDRFTISRDDSKNTAYLQMNNLKTEDTAVYYCVRHGNFGNSYISYWAYWGQGTLVTVSSGGGGSGGGGSGGGGSQTVVTQEPSLTVSPGGTVTLTCGSSTGAVTSGNYPNWVQQKPGQAPRGLIGGTKFLAPGTPARFSGSLLGGKAALTLSGVQPEDEAEYYCVLWYSNRWVFGGGTKLTVLGGGGDKTHTCPPCPAPELLGGPSVFLFPPKPKDTLMISRTPEVTCVVVDVSHEDPEVKFNWYVDGVEVHNAKTKPCEEQYGSTYRCVSVLTVLHQDWLNGKEYKCKVSNKALPAPIEKTISKAKGQPREPQVYTLPPSREEMTKNQVSLTCLVKGFYPSDIAVEWESNGQPENNYKTTPPVLDSDGSFFLYSKLTVDKSRWQQGNVFSCSVMHEALHNHYTQKSLSLSPGGGGSGGGGSGGGGSGGGGSGGGGSGGGGSDKTHTCPPCPAPELLGGPSVFLFPPKPKDTLMISRTPEVTCVVVDVSHEDPEVKFNWYVDGVEVHNAKTKPCEEQYGSTYRCVSVLTVLHQDWLNGKEYKCKVSNKALPAPIEKTISKAKGQPREPQVYTLPPSREEMTKNQVSLTCLVKGFYPSDIAVEWESNGQPENNYKTTPPVLDSDGSFFLYSKLTVDKSRWQQGNVFSCSVMHEALHNHYTQKSLSLSPGK

SEQ ID NO: 569 - protein, 987 aa, Artificial Sequence
  Synthetic peptide
QVTLKESGPALVKPTETLTLTCTLSGFSLNNARMAVSWIRQPPGKCLEWLAHIFSNDEKSYSTSLKSRLTISKDTSKSQVVLTMTNMDPEDTATYYCARIVGYGTGWYGFFDYWGQGILVTVSSGGGGSGGGGSGGGGSDIQMTQSPSSLSASVGDRVTITCRASQGIRNDLAWYQQKPGKAPKRLIYAASSLQSGVPSRFSGSGSGTEFTLTISSLQPEDFATYYCLQHNSYPLTFGCGTKVEIKSGGGGSEVQLVESGGGLVQPGGSLKLSCAASGFTFNKYAMNWVRQAPGKGLEWVARIRSKYNNYATYYADSVKDRFTISRDDSKNTAYLQMNNLKTEDTAVYYCVRHGNFGNSYISYWAYWGQGTLVTVSSGGGGSGGGGSGGGGSQTVVTQEPSLTVSPGGTVTLTCGSSTGAVTSGNYPNWVQQKPGQAPRGLIGGTKFLAPGTPARFSGSLLGGKAALTLSGVQPEDEAEYYCVLWYSNRWVFGGGTKLTVLGGGGDKTHTCPPCPAPELLGGPSVFLFPPKPKDTLMISRTPEVTCVVVDVSHEDPEVKFNWYVDGVEVHNAKTKPCEEQYGSTYRCVSVLTVLHQDWLNGKEYKCKVSNKALPAPIEKTISKAKGQPREPQVYTLPPSREEMTKNQVSLTCLVKGFYPSDIAVEWESNGQPENNYKTTPPVLDSDGSFFLYSKLTVDKSRWQQGNVFSCSVMHEALHNHYTQKSLSLSPGGGGSGGGGSGGGGSGGGGSGGGGSGGGGSDKTHTCPPCPAPELLGGPSVFLFPPKPKDTLMISRTPEVTCVVVDVSHEDPEVKFNWYVDGVEVHNAKTKPCEEQYGSTYRCVSVLTVLHQDWLNGKEYKCKVSNKALPAPIEKTISKAKGQPREPQVYTLPPSREEMTKNQVSLTCLVKGFYPSDIAVEWESNGQPENNYKTTPPVLDSDGSFFLYSKLTVDKSRWQQGNVFSCSVMHEALHNHYTQKSLSLSPGK

SEQ ID NO: 570 - protein, 987 aa, Artificial Sequence
  Synthetic peptide
QVTLKESGPTLVKPTETLTLTCTFSGFSLRYARMGVSWIRQPPGKALEWLAHIFSNDEKSYSTSLKSRLTISKDTSKSQVVLTLTNMDPVDTATYFCARMPEYSSGWSGAFDIWGQGTMVTVSSGGGGSGGGGSGGGGSDIQMTQSPSSLSASVGDRVTITCRASQDIRNDLAWYQQKPGKAPKRLIYAASSLQSGVPSRFSGSGSGTEFTLTISSLQPEDFATYYCLQHNSYPLTFGGGTKLEIKSGGGGSEVQLVESGGGLVQPGGSLKLSCAASGFTFNKYAMNWVRQAPGKGLEWVARIRSKYNNYATYYADSVKDRFTISRDDSKNTAYLQMNNLKTEDTAVYYCVRHGNFGNSYISYWAYWGQGTLVTVSSGGGGSGGGGSGGGGSQTVVTQEPSLTVSPGGTVTLTCGSSTGAVTSGNYPNWVQQKPGQAPRGLIGGTKFLAPGTPARFSGSLLGGKAALTLSGVQPEDEAEYYCVLWYSNRWVFGGGTKLTVLGGGGDKTHTCPPCPAPELLGGPSVFLFPPKPKDTLMISRTPEVTCVVVDVSHEDPEVKFNWYVDGVEVHNAKTKPCEEQYGSTYRCVSVLTVLHQDWLNGKEYKCKVSNKALPAPIEKTISKAKGQPREPQVYTLPPSREEMTKNQVSLTCLVKGFYPSDIAVEWESNGQPENNYKTTPPVLDSDGSFFLYSKLTVDKSRWQQGNVFSCSVMHEALHNHYTQKSLSLSPGGGGSGGGGSGGGGSGGGGSGGGGSGGGGSDKTHTCPPCPAPELLGGPSVFLFPPKPKDTLMISRTPEVTCVVVDVSHEDPEVKFNWYVDGVEVHNAKTKPCEEQYGSTYRCVSVLTVLHQDWLNGKEYKCKVSNKALPAPIEKTISKAKGQPREPQVYTLPPSREEMTKNQVSLTCLVKGFYPSDIAVEWESNGQPENNYKTTPPVLDSDGSFFLYSKLTVDKSRWQQGNVFSCSVMHEALHNHYTQKSLSLSPGK

SEQ ID NO: 571 - protein, 987 aa, Artificial Sequence
  Synthetic peptide
QVTLKESGPTLVKPTETLTLTCTFSGFSLRYARMGVSWIRQPPGKCLEWLAHIFSNDEKSYSTSLKSRLTISKDTSKSQVVLTLTNMDPVDTATYFCARMPEYSSGWSGAFDIWGQGTMVTVSSGGGGSGGGGSGGGGSDIQMTQSPSSLSASVGDRVTITCRASQDIRNDLAWYQQKPGKAPKRLIYAASSLQSGVPSRFSGSGSGTEFTLTISSLQPEDFATYYCLQHNSYPLTFGCGTKLEIKSGGGGSEVQLVESGGGLVQPGGSLKLSCAASGFTFNKYAMNWVRQAPGKGLEWVARIRSKYNNYATYYADSVKDRFTISRDDSKNTAYLQMNNLKTEDTAVYYCVRHGNFGNSYISYWAYWGQGTLVTVSSGGGGSGGGGSGGGGSQTVVTQEPSLTVSPGGTVTLTCGSSTGAVTSGNYPNWVQQKPGQAPRGLIGGTKFLAPGTPARFSGSLLGGKAALTLSGVQPEDEAEYYCVLWYSNRWVFGGGTKLTVLGGGGDKTHTCPPCPAPELLGGPSVFLFPPKPKDTLMISRTPEVTCVVVDVSHEDPEVKFNWYVDGVEVHNAKTKPCEEQYGSTYRCVSVLTVLHQDWLNGKEYKCKVSNKALPAPIEKTISKAKGQPREPQVYTLPPSREEMTKNQVSLTCLVKGFYPSDIAVEWESNGQPENNYKTTPPVLDSDGSFFLYSKLTVDKSRWQQGNVFSCSVMHEALHNHYTQKSLSLSPGGGGSGGGGSGGGGSGGGGSGGGGSGGGGSDKTHTCPPCPAPELLGGPSVFLFPPKPKDTLMISRTPEVTCVVVDVSHEDPEVKFNWYVDGVEVHNAKTKPCEEQYGSTYRCVSVLTVLHQDWLNGKEYKCKVSNKALPAPIEKTISKAKGQPREPQVYTLPPSREEMTKNQVSLTCLVKGFYPSDIAVEWESNGQPENNYKTTPPVLDSDGSFFLYSKLTVDKSRWQQGNVFSCSVMHEALHNHYTQKSLSLSPGK

SEQ ID NO: 572 - protein, 987 aa, Artificial Sequence
  Synthetic peptide
QVTLKESGPVLVKPTETLTLTCTVSGFSFRNARMGVSWIRQPPGKALEWLAHIFSNDEKSYSTSLKSRLTISKDTSKSQVVLTLTNMDPVDTATYFCARMPEYSSGWSGAFDIWGQGTMVTVSSGGGGSGGGGSGGGGSDIQMTQSPSSLSASVGDRVTITCRASQDIRDDLGWYQQKPGNAPKRLIYGASTLQSGVPSRFSGSGSGTEFTLTISSLQPEDFATYYCLQHNSYPLTFGGGTKVDIKSGGGGSEVQLVESGGGLVQPGGSLKLSCAASGFTFNKYAMNWVRQAPGKGLEWVARIRSKYNNYATYYADSVKDRFTISRDDSKNTAYLQMNNLKTEDTAVYYCVRHGNFGNSYISYWAYWGQGTLVTVSSGGGGSGGGGSGGGGSQTVVTQEPSLTVSPGGTVTLTCGSSTGAVTSGNYPNWVQQKPGQAPRGLIGGTKFLAPGTPARFSGSLLGGKAALTLSGVQPEDEAEYYCVLWYSNRWVFGGGTKLTVLGGGGDKTHTCPPCPAPELLGGPSVFLFPPKPKDTLMISRTPEVTCVVVDVSHEDPEVKFNWYVDGVEVHNAKTKPCEEQYGSTYRCVSVLTVLHQDWLNGKEYKCKVSNKALPAPIEKTISKAKGQPREPQVYTLPPSREEMTKNQVSLTCLVKGFYPSDIAVEWESNGQPENNYKTTPPVLDSDGSFFLYSKLTVDKSRWQQGNVFSCSVMHEALHNHYTQKSLSLSPGGGGSGGGGSGGGGSGGGGSGGGGSGGGGSDKTHTCPPCPAPELLGGPSVFLFPPKPKDTLMISRTPEVTCVVVDVSHEDPEVKFNWYVDGVEVHNAKTKPCEEQYGSTYRCVSVLTVLHQDWLNGKEYKCKVSNKALPAPIEKTISKAKGQPREPQVYTLPPSREEMTKNQVSLTCLVKGFYPSDIAVEWESNGQPENNYKTTPPVLDSDGSFFLYSKLTVDKSRWQQGNVFSCSVMHEALHNHYTQKSLSLSPGK

SEQ ID NO: 573 - protein, 987 aa, Artificial Sequence
  Synthetic peptide
QVTLKESGPVLVKPTETLTLTCTVSGFSFRNARMGVSWIRQPPGKCLEWLAHIFSNDEKSYSTSLKSRLTISKDTSKSQVVLTLTNMDPVDTATYFCARMPEYSSGWSGAFDIWGQGTMVTVSSGGGGSGGGGSGGGGSDIQMTQSPSSLSASVGDRVTITCRASQDIRDDLGWYQQKPGNAPKRLIYGASTLQSGVPSRFSGSGSGTEFTLTISSLQPEDFATYYCLQHNSYPLTFGCGTKVDIKSGGGGSEVQLVESGGGLVQPGGSLKLSCAASGFTFNKYAMNWVRQAPGKGLEWVARIRSKYNNYATYYADSVKDRFTISRDDSKNTAYLQMNNLKTEDTAVYYCVRHGNFGNSYISYWAYWGQGTLVTVSSGGGGSGGGGSGGGGSQTVVTQEPSLTVSPGGTVTLTCGSSTGAVTSGNYPNWVQQKPGQAPRGLIGGTKFLAPGTPARFSGSLLGGKAALTLSGVQPEDEAEYYCVLWYSNRWVFGGGTKLTVLGGGGDKTHTCPPCPAPELLGGPSVFLFPPKPKDTLMISRTPEVTCVVVDVSHEDPEVKFNWYVDGVEVHNAKTKPCEEQYGSTYRCVSVLTVLHQDWLNGKEYKCKVSNKALPAPIEKTISKAKGQPREPQVYTLPPSREEMTKNQVSLTCLVKGFYPSDIAVEWESNGQPENNYKTTPPVLDSDGSFFLYSKLTVDKSRWQQGNVFSCSVMHEALHNHYTQKSLSLSPGGGGSGGGGSGGGGSGGGGSGGGGSGGGGSDKTHTCPPCPAPELLGGPSVFLFPPKPKDTLMISRTPEVTCVVVDVSHEDPEVKFNWYVDGVEVHNAKTKPCEEQYGSTYRCVSVLTVLHQDWLNGKEYKCKVSNKALPAPIEKTISKAKGQPREPQVYTLPPSREEMTKNQVSLTCLVKGFYPSDIAVEWESNGQPENNYKTTPPVLDSDGSFFLYSKLTVDKSRWQQGNVFSCSVMHEALHNHYTQKSLSLSPGK

SEQ ID NO: 574 - protein, 987 aa, Artificial Sequence
  Synthetic peptide
QVTLKESGPALVKPTETLTLTCTVSGFSFRNARMGVSWIRQPPGKALEWLAHIFSNDEKSYSTSLKSRLTISKDTSKSQVVLTLTNMDPVDTATYFCARMPEYSSGWSGAFDIWGQGTMVTVSSGGGGSGGGGSGGGGSDIQMTQSPSSLSASVGDRVTITCRASQDIGYDLGWYQQKPGKAPKRLIYAASTLQSGVPSRFSGSGSGTEFTLIISSLQPEDFATYYCLQHNSFPWTFGQGTKVEIKSGGGGSEVQLVESGGGLVQPGGSLKLSCAASGFTFNKYAMNWVRQAPGKGLEWVARIRSKYNNYATYYADSVKDRFTISRDDSKNTAYLQMNNLKTEDTAVYYCVRHGNFGNSYISYWAYWGQGTLVTVSSGGGGSGGGGSGGGGSQTVVTQEPSLTVSPGGTVTLTCGSSTGAVTSGNYPNWVQQKPGQAPRGLIGGTKFLAPGTPARFSGSLLGGKAALTLSGVQPEDEAEYYCVLWYSNRWVFGGGTKLTVLGGGGDKTHTCPPCPAPELLGGPSVFLFPPKPKDTLMISRTPEVTCVVVDVSHEDPEVKFNWYVDGVEVHNAKTKPCEEQYGSTYRCVSVLTVLHQDWLNGKEYKCKVSNKALPAPIEKTISKAKGQPREPQVYTLPPSREEMTKNQVSLTCLVKGFYPSDIAVEWESNGQPENNYKTTPPVLDSDGSFFLYSKLTVDKSRWQQGNVFSCSVMHEALHNHYTQKSLSLSPGGGGSGGGGSGGGGSGGGGSGGGGSGGGGSDKTHTCPPCPAPELLGGPSVFLFPPKPKDTLMISRTPEVTCVVVDVSHEDPEVKFNWYVDGVEVHNAKTKPCEEQYGSTYRCVSVLTVLHQDWLNGKEYKCKVSNKALPAPIEKTISKAKGQPREPQVYTLPPSREEMTKNQVSLTCLVKGFYPSDIAVEWESNGQPENNYKTTPPVLDSDGSFFLYSKLTVDKSRWQQGNVFSCSVMHEALHNHYTQKSLSLSPGK

SEQ ID NO: 575 - protein, 987 aa, Artificial Sequence
  Synthetic peptide
QVTLKESGPALVKPTETLTLTCTVSGFSFRNARMGVSWIRQPPGKCLEWLAHIFSNDEKSYSTSLKSRLTISKDTSKSQVVLTLTNMDPVDTATYFCARMPEYSSGWSGAFDIWGQGTMVTVSSGGGGSGGGGSGGGGSDIQMTQSPSSLSASVGDRVTITCRASQDIGYDLGWYQQKPGKAPKRLIYAASTLQSGVPSRFSGSGSGTEFTLIISSLQPEDFATYYCLQHNSFPWTFGCGTKVEIKSGGGGSEVQLVESGGGLVQPGGSLKLSCAASGFTFNKYAMNWVRQAPGKGLEWVARIRSKYNNYATYYADSVKDRFTISRDDSKNTAYLQMNNLKTEDTAVYYCVRHGNFGNSYISYWAYWGQGTLVTVSSGGGGSGGGGSGGGGSQTVVTQEPSLTVSPGGTVTLTCGSSTGAVTSGNYPNWVQQKPGQAPRGLIGGTKFLAPGTPARFSGSLLGGKAALTLSGVQPEDEAEYYCVLWYSNRWVFGGGTKLTVLGGGGDKTHTCPPCPAPELLGGPSVFLFPPKPKDTLMISRTPEVTCVVVDVSHEDPEVKFNWYVDGVEVHNAKTKPCEEQYGSTYRCVSVLTVLHQDWLNGKEYKCKVSNKALPAPIEKTISKAKGQPREPQVYTLPPSREEMTKNQVSLTCLVKGFYPSDIAVEWESNGQPENNYKTTPPVLDSDGSFFLYSKLTVDKSRWQQGNVFSCSVMHEALHNHYTQKSLSLSPGGGGSGGGGSGGGGSGGGGSGGGGSGGGGSDKTHTCPPCPAPELLGGPSVFLFPPKPKDTLMISRTPEVTCVVVDVSHEDPEVKFNWYVDGVEVHNAKTKPCEEQYGSTYRCVSVLTVLHQDWLNGKEYKCKVSNKALPAPIEKTISKAKGQPREPQVYTLPPSREEMTKNQVSLTCLVKGFYPSDIAVEWESNGQPENNYKTTPPVLDSDGSFFLYSKLTVDKSRWQQGNVFSCSVMHEALHNHYTQKSLSLSPGK

SEQ ID NO: 576 - protein, 987 aa, Artificial Sequence
  Synthetic peptide
QVTLKESGPALVKPTQTLTLTCTFSGFSLSNARMGVSWIRQPPGKALEWLAHIFSNDEKSYRTSLKSRLTISKDTSKSQVVLTMTNMDPVDTATYYCARIVGYGSGWYAYFDYWGQGTLVTVSSGGGGSGGGGSGGGGSDIQMTQSPSSLSASVGDRVTITCRASQGIRNDLGWYQQKPGKAPKRLIYAASSLQSGVPSRFSGSGSGTEFTLTISSLQPEDFATYYCLQHNSYPLTFGGGTKVEIKSGGGGSEVQLVESGGGLVQPGGSLKLSCAASGFTFNKYAMNWVRQAPGKGLEWVARIRSKYNNYATYYADSVKDRFTISRDDSKNTAYLQMNNLKTEDTAVYYCVRHGNFGNSYISYWAYWGQGTLVTVSSGGGGSGGGGSGGGGSQTVVTQEPSLTVSPGGTVTLTCGSSTGAVTSGNYPNWVQQKPGQAPRGLIGGTKFLAPGTPARFSGSLLGGKAALTLSGVQPEDEAEYYCVLWYSNRWVFGGGTKLTVLGGGGDKTHTCPPCPAPELLGGPSVFLFPPKPKDTLMISRTPEVTCVVVDVSHEDPEVKFNWYVDGVEVHNAKTKPCEEQYGSTYRCVSVLTVLHQDWLNGKEYKCKVSNKALPAPIEKTISKAKGQPREPQVYTLPPSREEMTKNQVSLTCLVKGFYPSDIAVEWESNGQPENNYKTTPPVLDSDGSFFLYSKLTVDKSRWQQGNVFSCSVMHEALHNHYTQKSLSLSPGGGGSGGGGSGGGGSGGGGSGGGGSGGGGSDKTHTCPPCPAPELLGGPSVFLFPPKPKDTLMISRTPEVTCVVVDVSHEDPEVKFNWYVDGVEVHNAKTKPCEEQYGSTYRCVSVLTVLHQDWLNGKEYKCKVSNKALPAPIEKTISKAKGQPREPQVYTLPPSREEMTKNQVSLTCLVKGFYPSDIAVEWESNGQPENNYKTTPPVLDSDGSFFLYSKLTVDKSRWQQGNVFSCSVMHEALHNHYTQKSLSLSPGK

SEQ ID NO: 577 - protein, 987 aa, Artificial Sequence
  Synthetic peptide
QVTLKESGPALVKPTQTLTLTCTFSGFSLSNARMGVSWIRQPPGKCLEWLAHIFSNDEKSYRTSLKSRLTISKDTSKSQVVLTMTNMDPVDTATYYCARIVGYGSGWYAYFDYWGQGTLVTVSSGGGGSGGGGSGGGGSDIQMTQSPSSLSASVGDRVTITCRASQGIRNDLGWYQQKPGKAPKRLIYAASSLQSGVPSRFSGSGSGTEFTLTISSLQPEDFATYYCLQHNSYPLTFGCGTKVEIKSGGGGSEVQLVESGGGLVQPGGSLKLSCAASGFTFNKYAMNWVRQAPGKGLEWVARIRSKYNNYATYYADSVKDRFTISRDDSKNTAYLQMNNLKTEDTAVYYCVRHGNFGNSYISYWAYWGQGTLVTVSSGGGGSGGGGSGGGGSQTVVTQEPSLTVSPGGTVTLTCGSSTGAVTSGNYPNWVQQKPGQAPRGLIGGTKFLAPGTPARFSGSLLGGKAALTLSGVQPEDEAEYYCVLWYSNRWVFGGGTKLTVLGGGGDKTHTCPPCPAPELLGGPSVFLFPPKPKDTLMISRTPEVTCVVVDVSHEDPEVKFNWYVDGVEVHNAKTKPCEEQYGSTYRCVSVLTVLHQDWLNGKEYKCKVSNKALPAPIEKTISKAKGQPREPQVYTLPPSREEMTKNQVSLTCLVKGFYPSDIAVEWESNGQPENNYKTTPPVLDSDGSFFLYSKLTVDKSRWQQGNVFSCSVMHEALHNHYTQKSLSLSPGGGGSGGGGSGGGGSGGGGSGGGGSGGGGSDKTHTCPPCPAPELLGGPSVFLFPPKPKDTLMISRTPEVTCVVVDVSHEDPEVKFNWYVDGVEVHNAKTKPCEEQYGSTYRCVSVLTVLHQDWLNGKEYKCKVSNKALPAPIEKTISKAKGQPREPQVYTLPPSREEMTKNQVSLTCLVKGFYPSDIAVEWESNGQPENNYKTTPPVLDSDGSFFLYSKLTVDKSRWQQGNVFSCSVMHEALHNHYTQKSLSLSPGK

SEQ ID NO: 578 - protein, 987 aa, Artificial Sequence
  Synthetic peptide
QVTLKESGPVLVKPTQTLTLTCTFSGFSLSNARMGVSWIRQPPGKALEWLALIYWNDDKRYSPSLKSRLTITKDTSKNQVVLTMTNMDPVDTATYYCARMVGYGSGWYAYFDYWGQGTLVTVSSGGGGSGGGGSGGGGSDIQMTQSPSSLSASVGDRVTITCRASQGIRNDLGWYQQKPGKAPKRLIYAASSLQSGVPSRFSGSGSGTEFTLTISSLQPEDFATYYCLQHNSYPLTFGGGTKVEIKSGGGGSEVQLVESGGGLVQPGGSLKLSCAASGFTFNKYAMNWVRQAPGKGLEWVARIRSKYNNYATYYADSVKDRFTISRDDSKNTAYLQMNNLKTEDTAVYYCVRHGNFGNSYISYWAYWGQGTLVTVSSGGGGSGGGGSGGGGSQTVVTQEPSLTVSPGGTVTLTCGSSTGAVTSGNYPNWVQQKPGQAPRGLIGGTKFLAPGTPARFSGSLLGGKAALTLSGVQPEDEAEYYCVLWYSNRWVFGGGTKLTVLGGGGDKTHTCPPCPAPELLGGPSVFLFPPKPKDTLMISRTPEVTCVVVDVSHEDPEVKFNWYVDGVEVHNAKTKPCEEQYGSTYRCVSVLTVLHQDWLNGKEYKCKVSNKALPAPIEKTISKAKGQPREPQVYTLPPSREEMTKNQVSLTCLVKGFYPSDIAVEWESNGQPENNYKTTPPVLDSDGSFFLYSKLTVDKSRWQQGNVFSCSVMHEALHNHYTQKSLSLSPGGGGSGGGGSGGGGSGGGGSGGGGSGGGGSDKTHTCPPCPAPELLGGPSVFLFPPKPKDTLMISRTPEVTCVVVDVSHEDPEVKFNWYVDGVEVHNAKTKPCEEQYGSTYRCVSVLTVLHQDWLNGKEYKCKVSNKALPAPIEKTISKAKGQPREPQVYTLPPSREEMTKNQVSLTCLVKGFYPSDIAVEWESNGQPENNYKTTPPVLDSDGSFFLYSKLTVDKSRWQQGNVFSCSVMHEALHNHYTQKSLSLSPGK

SEQ ID NO: 579 - protein, 987 aa, Artificial Sequence
  Synthetic peptide
QVTLKESGPVLVKPTQTLTLTCTFSGFSLSNARMGVSWIRQPPGKCLEWLALIYWNDDKRYSPSLKSRLTITKDTSKNQVVLTMTNMDPVDTATYYCARMVGYGSGWYAYFDYWGQGTLVTVSSGGGGSGGGGSGGGGSDIQMTQSPSSLSASVGDRVTITCRASQGIRNDLGWYQQKPGKAPKRLIYAASSLQSGVPSRFSGSGSGTEFTLTISSLQPEDFATYYCLQHNSYPLTFGCGTKVEIKSGGGGSEVQLVESGGGLVQPGGSLKLSCAASGFTFNKYAMNWVRQAPGKGLEWVARIRSKYNNYATYYADSVKDRFTISRDDSKNTAYLQMNNLKTEDTAVYYCVRHGNFGNSYISYWAYWGQGTLVTVSSGGGGSGGGGSGGGGSQTVVTQEPSLTVSPGGTVTLTCGSSTGAVTSGNYPNWVQQKPGQAPRGLIGGTKFLAPGTPARFSGSLLGGKAALTLSGVQPEDEAEYYCVLWYSNRWVFGGGTKLTVLGGGGDKTHTCPPCPAPELLGGPSVFLFPPKPKDTLMISRTPEVTCVVVDVSHEDPEVKFNWYVDGVEVHNAKTKPCEEQYGSTYRCVSVLTVLHQDWLNGKEYKCKVSNKALPAPIEKTISKAKGQPREPQVYTLPPSREEMTKNQVSLTCLVKGFYPSDIAVEWESNGQPENNYKTTPPVLDSDGSFFLYSKLTVDKSRWQQGNVFSCSVMHEALHNHYTQKSLSLSPGGGGSGGGGSGGGGSGGGGSGGGGSGGGGSDKTHTCPPCPAPELLGGPSVFLFPPKPKDTLMISRTPEVTCVVVDVSHEDPEVKFNWYVDGVEVHNAKTKPCEEQYGSTYRCVSVLTVLHQDWLNGKEYKCKVSNKALPAPIEKTISKAKGQPREPQVYTLPPSREEMTKNQVSLTCLVKGFYPSDIAVEWESNGQPENNYKTTPPVLDSDGSFFLYSKLTVDKSRWQQGNVFSCSVMHEALHNHYTQKSLSLSPGK

SEQ ID NO: 580 - protein, 987 aa, Artificial Sequence
  Synthetic peptide
QVTLKESGPALVKPTQTLTLTCTFSGFSLSNARMGVSWIRQPPGKALEWLAHIFSNDEKSYSTSLKSRLTISKDTSKSQVVLTMTDMDPEDTATYYCARIVGYGTGWYGFFDYWGQGILVTVSSGGGGSGGGGSGGGGSDIQMTQSPSSLSASVGDRVTITCRTSQGIRNDLGWYQQKPGKAPKRLIYAASSLQSGVPSRFSGSGSGTEFTLTISSLQPEDFATYYCLQHNSYPLTFGGGTKVEIKSGGGGSEVQLVESGGGLVQPGGSLKLSCAASGFTFNKYAMNWVRQAPGKGLEWVARIRSKYNNYATYYADSVKDRFTISRDDSKNTAYLQMNNLKTEDTAVYYCVRHGNFGNSYISYWAYWGQGTLVTVSSGGGGSGGGGSGGGGSQTVVTQEPSLTVSPGGTVTLTCGSSTGAVTSGNYPNWVQQKPGQAPRGLIGGTKFLAPGTPARFSGSLLGGKAALTLSGVQPEDEAEYYCVLWYSNRWVFGGGTKLTVLGGGGDKTHTCPPCPAPELLGGPSVFLFPPKPKDTLMISRTPEVTCVVVDVSHEDPEVKFNWYVDGVEVHNAKTKPCEEQYGSTYRCVSVLTVLHQDWLNGKEYKCKVSNKALPAPIEKTISKAKGQPREPQVYTLPPSREEMTKNQVSLTCLVKGFYPSDIAVEWESNGQPENNYKTTPPVLDSDGSFFLYSKLTVDKSRWQQGNVFSCSVMHEALHNHYTQKSLSLSPGGGGSGGGGSGGGGSGGGGSGGGGSGGGGSDKTHTCPPCPAPELLGGPSVFLFPPKPKDTLMISRTPEVTCVVVDVSHEDPEVKFNWYVDGVEVHNAKTKPCEEQYGSTYRCVSVLTVLHQDWLNGKEYKCKVSNKALPAPIEKTISKAKGQPREPQVYTLPPSREEMTKNQVSLTCLVKGFYPSDIAVEWESNGQPENNYKTTPPVLDSDGSFFLYSKLTVDKSRWQQGNVFSCSVMHEALHNHYTQKSLSLSPGK

SEQ ID NO: 581 - protein, 987 aa, Artificial Sequence
  Synthetic peptide
QVTLKESGPALVKPTQTLTLTCTFSGFSLSNARMGVSWIRQPPGKCLEWLAHIFSNDEKSYSTSLKSRLTISKDTSKSQVVLTMTDMDPEDTATYYCARIVGYGTGWYGFFDYWGQGILVTVSSGGGGSGGGGSGGGGSDIQMTQSPSSLSASVGDRVTITCRTSQGIRNDLGWYQQKPGKAPKRLIYAASSLQSGVPSRFSGSGSGTEFTLTISSLQPEDFATYYCLQHNSYPLTFGCGTKVEIKSGGGGSEVQLVESGGGLVQPGGSLKLSCAASGFTFNKYAMNWVRQAPGKGLEWVARIRSKYNNYATYYADSVKDRFTISRDDSKNTAYLQMNNLKTEDTAVYYCVRHGNFGNSYISYWAYWGQGTLVTVSSGGGGSGGGGSGGGGSQTVVTQEPSLTVSPGGTVTLTCGSSTGAVTSGNYPNWVQQKPGQAPRGLIGGTKFLAPGTPARFSGSLLGGKAALTLSGVQPEDEAEYYCVLWYSNRWVFGGGTKLTVLGGGGDKTHTCPPCPAPELLGGPSVFLFPPKPKDTLMISRTPEVTCVVVDVSHEDPEVKFNWYVDGVEVHNAKTKPCEEQYGSTYRCVSVLTVLHQDWLNGKEYKCKVSNKALPAPIEKTISKAKGQPREPQVYTLPPSREEMTKNQVSLTCLVKGFYPSDIAVEWESNGQPENNYKTTPPVLDSDGSFFLYSKLTVDKSRWQQGNVFSCSVMHEALHNHYTQKSLSLSPGGGGSGGGGSGGGGSGGGGSGGGGSGGGGSDKTHTCPPCPAPELLGGPSVFLFPPKPKDTLMISRTPEVTCVVVDVSHEDPEVKFNWYVDGVEVHNAKTKPCEEQYGSTYRCVSVLTVLHQDWLNGKEYKCKVSNKALPAPIEKTISKAKGQPREPQVYTLPPSREEMTKNQVSLTCLVKGFYPSDIAVEWESNGQPENNYKTTPPVLDSDGSFFLYSKLTVDKSRWQQGNVFSCSVMHEALHNHYTQKSLSLSPGK

SEQ ID NO: 582 - protein, 992 aa, Artificial Sequence
  Synthetic peptide
QVQLVESGGGVVQPGRSLRLSCAASGFTFSSYGMHWVRQAPGKGLEWVAVISYEGSNEFYAESVKGRFTISRDNSKNTLYLQMNSLRAEDTAVYYCARGGEITMVRGVIGYYYYGMDVWGQGTTVTVSSGGGGSGGGGSGGGGSDIQMTQSPSSLSASVGDRVTITCRASQSISSYLNWYQQKPGKAPKLLIYAASSLQSGVPSRFSGSGSGTEFTLTISSLQPEDFATYYCLQHNSYPLTFGGGTKVEIKSGGGGSEVQLVESGGGLVQPGGSLKLSCAASGFTFNKYAMNWVRQAPGKGLEWVARIRSKYNNYATYYADSVKDRFTISRDDSKNTAYLQMNNLKTEDTAVYYCVRHGNFGNSYISYWAYWGQGTLVTVSSGGGGSGGGGSGGGGSQTVVTQEPSLTVSPGGTVTLTCGSSTGAVTSGNYPNWVQQKPGQAPRGLIGGTKFLAPGTPARFSGSLLGGKAALTLSGVQPEDEAEYYCVLWYSNRWVFGGGTKLTVLGGGGDKTHTCPPCPAPELLGGPSVFLFPPKPKDTLMISRTPEVTCVVVDVSHEDPEVKFNWYVDGVEVHNAKTKPCEEQYGSTYRCVSVLTVLHQDWLNGKEYKCKVSNKALPAPIEKTISKAKGQPREPQVYTLPPSREEMTKNQVSLTCLVKGFYPSDIAVEWESNGQPENNYKTTPPVLDSDGSFFLYSKLTVDKSRWQQGNVFSCSVMHEALHNHYTQKSLSLSPGGGGSGGGGSGGGGSGGGGSGGGGSGGGGSDKTHTCPPCPAPELLGGPSVFLFPPKPKDTLMISRTPEVTCVVVDVSHEDPEVKFNWYVDGVEVHNAKTKPCEEQYGSTYRCVSVLTVLHQDWLNGKEYKCKVSNKALPAPIEKTISKAKGQPREPQVYTLPPSREEMTKNQVSLTCLVKGFYPSDIAVEWESNGQPENNYKTTPPVLDSDGSFFLYSKLTVDKSRWQQGNVFSCSVMHEALHNHYTQKSLSLSPGK

SEQ ID NO: 583 - protein, 992 aa, Artificial Sequence
  Synthetic peptide
QVQLVESGGGVVQPGRSLRLSCAASGFTFSSYGMHWVRQAPGKCLEWVAVISYEGSNEFYAESVKGRFTISRDNSKNTLYLQMNSLRAEDTAVYYCARGGEITMVRGVIGYYYYGMDVWGQGTTVTVSSGGGGSGGGGSGGGGSDIQMTQSPSSLSASVGDRVTITCRASQSISSYLNWYQQKPGKAPKLLIYAASSLQSGVPSRFSGSGSGTEFTLTISSLQPEDFATYYCLQHNSYPLTFGCGTKVEIKSGGGGSEVQLVESGGGLVQPGGSLKLSCAASGFTFNKYAMNWVRQAPGKGLEWVARIRSKYNNYATYYADSVKDRFTISRDDSKNTAYLQMNNLKTEDTAVYYCVRHGNFGNSYISYWAYWGQGTLVTVSSGGGGSGGGGSGGGGSQTVVTQEPSLTVSPGGTVTLTCGSSTGAVTSGNYPNWVQQKPGQAPRGLIGGTKFLAPGTPARFSGSLLGGKAALTLSGVQPEDEAEYYCVLWYSNRWVFGGGTKLTVLGGGGDKTHTCPPCPAPELLGGPSVFLFPPKPKDTLMISRTPEVTCVVVDVSHEDPEVKFNWYVDGVEVHNAKTKPCEEQYGSTYRCVSVLTVLHQDWLNGKEYKCKVSNKALPAPIEKTISKAKGQPREPQVYTLPPSREEMTKNQVSLTCLVKGFYPSDIAVEWESNGQPENNYKTTPPVLDSDGSFFLYSKLTVDKSRWQQGNVFSCSVMHEALHNHYTQKSLSLSPGGGGSGGGGSGGGGSGGGGSGGGGSGGGGSDKTHTCPPCPAPELLGGPSVFLFPPKPKDTLMISRTPEVTCVVVDVSHEDPEVKFNWYVDGVEVHNAKTKPCEEQYGSTYRCVSVLTVLHQDWLNGKEYKCKVSNKALPAPIEKTISKAKGQPREPQVYTLPPSREEMTKNQVSLTCLVKGFYPSDIAVEWESNGQPENNYKTTPPVLDSDGSFFLYSKLTVDKSRWQQGNVFSCSVMHEALHNHYTQKSLSLSPGK

SEQ ID NO: 584 - protein, 5 aa, Artificial Sequence
  Synthetic peptide
SYAMS

SEQ ID NO: 585 - protein, 17 aa, Artificial Sequence
  Synthetic peptide
VISGSGGRPNYAESVKG

SEQ ID NO: 586 - protein, 11 aa, Artificial Sequence
  Synthetic peptide
VDYSNYLFFDY

SEQ ID NO: 587 - protein, 12 aa, Artificial Sequence
  Synthetic peptide
RAGQSVRSSYLG

SEQ ID NO: 588 - protein, 7 aa, Artificial Sequence
  Synthetic peptide
GASSRAT

SEQ ID NO: 589 - protein, 9 aa, Artificial Sequence
  Synthetic peptide
QQYGYSPPT

SEQ ID NO: 590 - protein, 120 aa, Artificial Sequence
  Synthetic peptide
EVQLLESGGGLVQPGGSLRLSCAASGFTFSSYAMSWVRQAPGKCLEWVSVISGSGGRPNYAESVKGRFTISRDNSKNTLYLQMNSLRDEDTAVYYCAKVDYSNYLFFDYWGQGTLVTVSS

SEQ ID NO: 591 - protein, 108 aa, Artificial Sequence
  Synthetic peptide
EIVLTQSPGTLSLSPGEGATLSCRAGQSVRSSYLGWYQQKPGQAPRLLIYGASSRATGIPDRFSGSGSGTDFTLTISRLEPEDFAVYYCQQYGYSPPTFGCGTKLEIK

SEQ ID NO: 592 - protein, 243 aa, Artificial Sequence
  Synthetic peptide
EVQLLESGGGLVQPGGSLRLSCAASGFTFSSYAMSWVRQAPGKCLEWVSVISGSGGRPNYAESVKGRFTISRDNSKNTLYLQMNSLRDEDTAVYYCAKVDYSNYLFFDYWGQGTLVTVSSGGGGSGGGGSGGGGSEIVLTQSPGTLSLSPGEGATLSCRAGQSVRSSYLGWYQQKPGQAPRLLIYGASSRATGIPDRFSGSGSGTDFTLTISRLEPEDFAVYYCQQYGYSPPTFGCGTKLEIK

SEQ ID NO: 593 - protein, 498 aa, Artificial Sequence
  Synthetic peptide
EVQLLESGGGLVQPGGSLRLSCAASGFTFSSYAMSWVRQAPGKCLEWVSVISGSGGRPNYAESVKGRFTISRDNSKNTLYLQMNSLRDEDTAVYYCAKVDYSNYLFFDYWGQGTLVTVSSGGGGSGGGGSGGGGSEIVLTQSPGTLSLSPGEGATLSCRAGQSVRSSYLGWYQQKPGQAPRLLIYGASSRATGIPDRFSGSGSGTDFTLTISRLEPEDFAVYYCQQYGYSPPTFGCGTKLEIKSGGGGSEVQLVESGGGLVQPGGSLKLSCAASGFTFNKYAMNWVRQAPGKGLEWVARIRSKYNNYATYYADSVKDRFTISRDDSKNTAYLQMNNLKTEDTAVYYCVRHGNFGNSYISYWAYWGQGTLVTVSSGGGGSGGGGSGGGGSQTVVTQEPSLTVSPGGTVTLTCGSSTGAVTSGNYPNWVQQKPGQAPRGLIGGTKFLAPGTPARFSGSLLGGKAALTLSGVQPEDEAEYYCVLWYSNRWVFGGGTKLTVL

SEQ ID NO: 594 - protein, 986 aa, Artificial Sequence
  Synthetic peptide
EVQLLESGGGLVQPGGSLRLSCAASGFTFSSYAMSWVRQAPGKCLEWVSVISGSGGRPNYAESVKGRFTISRDNSKNTLYLQMNSLRDEDTAVYYCAKVDYSNYLFFDYWGQGTLVTVSSGGGGSGGGGSGGGGSEIVLTQSPGTLSLSPGEGATLSCRAGQSVRSSYLGWYQQKPGQAPRLLIYGASSRATGIPDRFSGSGSGTDFTLTISRLEPEDFAVYYCQQYGYSPPTFGCGTKLEIKSGGGGSEVQLVESGGGLVQPGGSLKLSCAASGFTFNKYAMNWVRQAPGKGLEWVARIRSKYNNYATYYADSVKDRFTISRDDSKNTAYLQMNNLKTEDTAVYYCVRHGNFGNSYISYWAYWGQGTLVTVSSGGGGSGGGGSGGGGSQTVVTQEPSLTVSPGGTVTLTCGSSTGAVTSGNYPNWVQQKPGQAPRGLIGGTKFLAPGTPARFSGSLLGGKAALTLSGVQPEDEAEYYCVLWYSNRWVFGGGTKLTVLGGGGDKTHTCPPCPAPELLGGPSVFLFPPKPKDTLMISRTPEVTCVVVDVSHEDPEVKFNWYVDGVEVHNAKTKPCEEQYGSTYRCVSVLTVLHQDWLNGKEYKCKVSNKALPAPIEKTISKAKGQPREPQVYTLPPSREEMTKNQVSLTCLVKGFYPSDIAVEWESNGQPENNYKTTPPVLDSDGSFFLYSKLTVDKSRWQQGNVFSCSVMHEALHNHYTQKSLSLSPGKGGGGSGGGGSGGGGSGGGGSGGGGSGGGGSDKTHTCPPCPAPELLGGPSVFLFPPKPKDTLMISRTPEVTCVVVDVSHEDPEVKFNWYVDGVEVHNAKTKPCEEQYGSTYRCVSVLTVLHQDWLNGKEYKCKVSNKALPAPIEKTISKAKGQPREPQVYTLPPSREEMTKNQVSLTCLVKGFYPSDIAVEWESNGQPENNYKTTPPVLDSDGSFFLYSKLTVDKSRWQQGNVFSCSVMHEALHNHYTQKSLSLSPGK

SEQ ID NO: 595 - protein, 120 aa, Artificial Sequence
  Synthetic peptide
EVQLLESGGGLVQPGGSLRLSCAASGFTFSSYAMSWVRQAPGKGLEWVSVISGSGGRPNYAESVKGRFTISRDNSKNTLYLQMNSLRDEDTAVYYCAKVDYSNYLFFDYWGQGTLVTVSS

SEQ ID NO: 596 - protein, 108 aa, Artificial Sequence
  Synthetic peptide
EIVLTQSPGTLSLSPGEGATLSCRAGQSVRSSYLGWYQQKPGQAPRLLIYGASSRATGIPDRFSGSGSGTDFTLTISRLEPEDFAVYYCQQYGYSPPTFGGGTKLEIK

SEQ ID NO: 597 - protein, 243 aa, Artificial Sequence
  Synthetic peptide
EVQLLESGGGLVQPGGSLRLSCAASGFTFSSYAMSWVRQAPGKGLEWVSVISGSGGRPNYAESVKGRFTISRDNSKNTLYLQMNSLRDEDTAVYYCAKVDYSNYLFFDYWGQGTLVTVSSGGGGSGGGGSGGGGSEIVLTQSPGTLSLSPGEGATLSCRAGQSVRSSYLGWYQQKPGQAPRLLIYGASSRATGIPDRFSGSGSGTDFTLTISRLEPEDFAVYYCQQYGYSPPTFGGGTKLEIK

SEQ ID NO: 598 - protein, 498 aa, Artificial Sequence
  Synthetic peptide
EVQLLESGGGLVQPGGSLRLSCAASGFTFSSYAMSWVRQAPGKGLEWVSVISGSGGRPNYAESVKGRFTISRDNSKNTLYLQMNSLRDEDTAVYYCAKVDYSNYLFFDYWGQGTLVTVSSGGGGSGGGGSGGGGSEIVLTQSPGTLSLSPGEGATLSCRAGQSVRSSYLGWYQQKPGQAPRLLIYGASSRATGIPDRFSGSGSGTDFTLTISRLEPEDFAVYYCQQYGYSPPTFGGGTKLEIKSGGGGSEVQLVESGGGLVQPGGSLKLSCAASGFTFNKYAMNWVRQAPGKGLEWVARIRSKYNNYATYYADSVKDRFTISRDDSKNTAYLQMNNLKTEDTAVYYCVRHGNFGNSYISYWAYWGQGTLVTVSSGGGGSGGGGSGGGGSQTVVTQEPSLTVSPGGTVTLTCGSSTGAVTSGNYPNWVQQKPGQAPRGLIGGTKFLAPGTPARFSGSLLGGKAALTLSGVQPEDEAEYYCVLWYSNRWVFGGGTKLTVL

SEQ ID NO: 599 - protein, 986 aa, Artificial Sequence
  Synthetic peptide
EVQLLESGGGLVQPGGSLRLSCAASGFTFSSYAMSWVRQAPGKGLEWVSVISGSGGRPNYAESVKGRFTISRDNSKNTLYLQMNSLRDEDTAVYYCAKVDYSNYLFFDYWGQGTLVTVSSGGGGSGGGGSGGGGSEIVLTQSPGTLSLSPGEGATLSCRAGQSVRSSYLGWYQQKPGQAPRLLIYGASSRATGIPDRFSGSGSGTDFTLTISRLEPEDFAVYYCQQYGYSPPTFGGGTKLEIKSGGGGSEVQLVESGGGLVQPGGSLKLSCAASGFTFNKYAMNWVRQAPGKGLEWVARIRSKYNNYATYYADSVKDRFTISRDDSKNTAYLQMNNLKTEDTAVYYCVRHGNFGNSYISYWAYWGQGTLVTVSSGGGGSGGGGSGGGGSQTVVTQEPSLTVSPGGTVTLTCGSSTGAVTSGNYPNWVQQKPGQAPRGLIGGTKFLAPGTPARFSGSLLGGKAALTLSGVQPEDEAEYYCVLWYSNRWVFGGGTKLTVLGGGGDKTHTCPPCPAPELLGGPSVFLFPPKPKDTLMISRTPEVTCVVVDVSHEDPEVKFNWYVDGVEVHNAKTKPCEEQYGSTYRCVSVLTVLHQDWLNGKEYKCKVSNKALPAPIEKTISKAKGQPREPQVYTLPPSREEMTKNQVSLTCLVKGFYPSDIAVEWESNGQPENNYKTTPPVLDSDGSFFLYSKLTVDKSRWQQGNVFSCSVMHEALHNHYTQKSLSLSPGKGGGGSGGGGSGGGGSGGGGSGGGGSGGGGSDKTHTCPPCPAPELLGGPSVFLFPPKPKDTLMISRTPEVTCVVVDVSHEDPEVKFNWYVDGVEVHNAKTKPCEEQYGSTYRCVSVLTVLHQDWLNGKEYKCKVSNKALPAPIEKTISKAKGQPREPQVYTLPPSREEMTKNQVSLTCLVKGFYPSDIAVEWESNGQPENNYKTTPPVLDSDGSFFLYSKLTVDKSRWQQGNVFSCSVMHEALHNHYTQKSLSLSPGK

SEQ ID NO: 600 - protein, 5 aa, Artificial Sequence
  Synthetic peptide
IYAMS

SEQ ID NO: 601 - protein, 17 aa, Artificial Sequence
  Synthetic peptide
AISGSGGSTFYAESVKG

SEQ ID NO: 602 - protein, 11 aa, Artificial Sequence
  Synthetic peptide
HDYSNYPYFDY

SEQ ID NO: 603 - protein, 12 aa, Artificial Sequence
  Synthetic peptide
RASQSVRSSYLA

SEQ ID NO: 604 - protein, 7 aa, Artificial Sequence
  Synthetic peptide
GASSRAT

SEQ ID NO: 605 - protein, 9 aa, Artificial Sequence
  Synthetic peptide
QQYGDLPFT

SEQ ID NO: 606 - protein, 120 aa, Artificial Sequence
  Synthetic peptide
EVQLLESGGGLVQPGGSLKLSCAASGFTFSIYAMSWVRQAPGKCLEWVSAISGSGGSTFYAESVKGRFTISRDNSKNTLYLQMNSLRAEDTAVYYCAKHDYSNYPYFDYWGQGTLVTVSS

SEQ ID NO: 607 - protein, 108 aa, Artificial Sequence
  Synthetic peptide
EIVLTQSPGTLSLSPGERATLSCRASQSVRSSYLAWYQQKPGQAPRLLIYGASSRATGIPDRFSGSGSGTDFTLTISRLEPEDFAVYYCQQYGDLPFTFGCGTKLEIK

SEQ ID NO: 608 - protein, 243 aa, Artificial Sequence
  Synthetic peptide
EVQLLESGGGLVQPGGSLKLSCAASGFTFSIYAMSWVRQAPGKCLEWVSAISGSGGSTFYAESVKGRFTISRDNSKNTLYLQMNSLRAEDTAVYYCAKHDYSNYPYFDYWGQGTLVTVSSGGGGSGGGGSGGGGSEIVLTQSPGTLSLSPGERATLSCRASQSVRSSYLAWYQQKPGQAPRLLIYGASSRATGIPDRFSGSGSGTDFTLTISRLEPEDFAVYYCQQYGDLPFTFGCGTKLEIK

SEQ ID NO: 609 - protein, 498 aa, Artificial Sequence
  Synthetic peptide
EVQLLESGGGLVQPGGSLKLSCAASGFTFSIYAMSWVRQAPGKCLEWVSAISGSGGSTFYAESVKGRFTISRDNSKNTLYLQMNSLRAEDTAVYYCAKHDYSNYPYFDYWGQGTLVTVSSGGGGSGGGGSGGGGSEIVLTQSPGTLSLSPGERATLSCRASQSVRSSYLAWYQQKPGQAPRLLIYGASSRATGIPDRFSGSGSGTDFTLTISRLEPEDFAVYYCQQYGDLPFTFGCGTKLEIKSGGGGSEVQLVESGGGLVQPGGSLKLSCAASGFTFNKYAMNWVRQAPGKGLEWVARIRSKYNNYATYYADSVKDRFTISRDDSKNTAYLQMNNLKTEDTAVYYCVRHGNFGNSYISYWAYWGQGTLVTVSSGGGGSGGGGSGGGGSQTVVTQEPSLTVSPGGTVTLTCGSSTGAVTSGNYPNWVQQKPGQAPRGLIGGTKFLAPGTPARFSGSLLGGKAALTLSGVQPEDEAEYYCVLWYSNRWVFGGGTKLTVL

SEQ ID NO: 610 - protein, 986 aa, Artificial Sequence
  Synthetic peptide
EVQLLESGGGLVQPGGSLKLSCAASGFTFSIYAMSWVRQAPGKCLEWVSAISGSGGSTFYAESVKGRFTISRDNSKNTLYLQMNSLRAEDTAVYYCAKHDYSNYPYFDYWGQGTLVTVSSGGGGSGGGGSGGGGSEIVLTQSPGTLSLSPGERATLSCRASQSVRSSYLAWYQQKPGQAPRLLIYGASSRATGIPDRFSGSGSGTDFTLTISRLEPEDFAVYYCQQYGDLPFTFGCGTKLEIKSGGGGSEVQLVESGGGLVQPGGSLKLSCAASGFTFNKYAMNWVRQAPGKGLEWVARIRSKYNNYATYYADSVKDRFTISRDDSKNTAYLQMNNLKTEDTAVYYCVRHGNFGNSYISYWAYWGQGTLVTVSSGGGGSGGGGSGGGGSQTVVTQEPSLTVSPGGTVTLTCGSSTGAVTSGNYPNWVQQKPGQAPRGLIGGTKFLAPGTPARFSGSLLGGKAALTLSGVQPEDEAEYYCVLWYSNRWVFGGGTKLTVLGGGGDKTHTCPPCPAPELLGGPSVFLFPPKPKDTLMISRTPEVTCVVVDVSHEDPEVKFNWYVDGVEVHNAKTKPCEEQYGSTYRCVSVLTVLHQDWLNGKEYKCKVSNKALPAPIEKTISKAKGQPREPQVYTLPPSREEMTKNQVSLTCLVKGFYPSDIAVEWESNGQPENNYKTTPPVLDSDGSFFLYSKLTVDKSRWQQGNVFSCSVMHEALHNHYTQKSLSLSPGKGGGGSGGGGSGGGGSGGGGSGGGGSGGGGSDKTHTCPPCPAPELLGGPSVFLFPPKPKDTLMISRTPEVTCVVVDVSHEDPEVKFNWYVDGVEVHNAKTKPCEEQYGSTYRCVSVLTVLHQDWLNGKEYKCKVSNKALPAPIEKTISKAKGQPREPQVYTLPPSREEMTKNQVSLTCLVKGFYPSDIAVEWESNGQPENNYKTTPPVLDSDGSFFLYSKLTVDKSRWQQGNVFSCSVMHEALHNHYTQKSLSLSPGK

SEQ ID NO: 611 - protein, 120 aa, Artificial Sequence
  Synthetic peptide
EVQLLESGGGLVQPGGSLKLSCAASGFTFSIYAMSWVRQAPGKGLEWVSAISGSGGSTFYAESVKGRFTISRDNSKNTLYLQMNSLRAEDTAVYYCAKHDYSNYPYFDYWGQGTLVTVSS

SEQ ID NO: 612 - protein, 108 aa, Artificial Sequence
  Synthetic peptide
EIVLTQSPGTLSLSPGERATLSCRASQSVRSSYLAWYQQKPGQAPRLLIYGASSRATGIPDRFSGSGSGTDFTLTISRLEPEDFAVYYCQQYGDLPFTFGPGTKLEIK

SEQ ID NO: 613 - protein, 243 aa, Artificial Sequence
  Synthetic peptide
EVQLLESGGGLVQPGGSLKLSCAASGFTFSIYAMSWVRQAPGKGLEWVSAISGSGGSTFYAESVKGRFTISRDNSKNTLYLQMNSLRAEDTAVYYCAKHDYSNYPYFDYWGQGTLVTVSSGGGGSGGGGSGGGGSEIVLTQSPGTLSLSPGERATLSCRASQSVRSSYLAWYQQKPGQAPRLLIYGASSRATGIPDRFSGSGSGTDFTLTISRLEPEDFAVYYCQQYGDLPFTFGPGTKLEIK

SEQ ID NO: 614 - protein, 498 aa, Artificial Sequence
  Synthetic peptide
EVQLLESGGGLVQPGGSLKLSCAASGFTFSIYAMSWVRQAPGKGLEWVSAISGSGGSTFYAESVKGRFTISRDNSKNTLYLQMNSLRAEDTAVYYCAKHDYSNYPYFDYWGQGTLVTVSSGGGGSGGGGSGGGGSEIVLTQSPGTLSLSPGERATLSCRASQSVRSSYLAWYQQKPGQAPRLLIYGASSRATGIPDRFSGSGSGTDFTLTISRLEPEDFAVYYCQQYGDLPFTFGPGTKLEIKSGGGGSEVQLVESGGGLVQPGGSLKLSCAASGFTFNKYAMNWVRQAPGKGLEWVARIRSKYNNYATYYADSVKDRFTISRDDSKNTAYLQMNNLKTEDTAVYYCVRHGNFGNSYISYWAYWGQGTLVTVSSGGGGSGGGGSGGGGSQTVVTQEPSLTVSPGGTVTLTCGSSTGAVTSGNYPNWVQQKPGQAPRGLIGGTKFLAPGTPARFSGSLLGGKAALTLSGVQPEDEAEYYCVLWYSNRWVFGGGTKLTVL

SEQ ID NO: 615 - protein, 986 aa, Artificial Sequence
  Synthetic peptide
EVQLLESGGGLVQPGGSLKLSCAASGFTFSIYAMSWVRQAPGKGLEWVSAISGSGGSTFYAESVKGRFTISRDNSKNTLYLQMNSLRAEDTAVYYCAKHDYSNYPYFDYWGQGTLVTVSSGGGGSGGGGSGGGGSEIVLTQSPGTLSLSPGERATLSCRASQSVRSSYLAWYQQKPGQAPRLLIYGASSRATGIPDRFSGSGSGTDFTLTISRLEPEDFAVYYCQQYGDLPFTFGPGTKLEIKSGGGGSEVQLVESGGGLVQPGGSLKLSCAASGFTFNKYAMNWVRQAPGKGLEWVARIRSKYNNYATYYADSVKDRFTISRDDSKNTAYLQMNNLKTEDTAVYYCVRHGNFGNSYISYWAYWGQGTLVTVSSGGGGSGGGGSGGGGSQTVVTQEPSLTVSPGGTVTLTCGSSTGAVTSGNYPNWVQQKPGQAPRGLIGGTKFLAPGTPARFSGSLLGGKAALTLSGVQPEDEAEYYCVLWYSNRWVFGGGTKLTVLGGGGDKTHTCPPCPAPELLGGPSVFLFPPKPKDTLMISRTPEVTCVVVDVSHEDPEVKFNWYVDGVEVHNAKTKPCEEQYGSTYRCVSVLTVLHQDWLNGKEYKCKVSNKALPAPIEKTISKAKGQPREPQVYTLPPSREEMTKNQVSLTCLVKGFYPSDIAVEWESNGQPENNYKTTPPVLDSDGSFFLYSKLTVDKSRWQQGNVFSCSVMHEALHNHYTQKSLSLSPGKGGGGSGGGGSGGGGSGGGGSGGGGSGGGGSDKTHTCPPCPAPELLGGPSVFLFPPKPKDTLMISRTPEVTCVVVDVSHEDPEVKFNWYVDGVEVHNAKTKPCEEQYGSTYRCVSVLTVLHQDWLNGKEYKCKVSNKALPAPIEKTISKAKGQPREPQVYTLPPSREEMTKNQVSLTCLVKGFYPSDIAVEWESNGQPENNYKTTPPVLDSDGSFFLYSKLTVDKSRWQQGNVFSCSVMHEALHNHYTQKSLSLSPGK

SEQ ID NO: 616 - protein, 5 aa, Artificial Sequence
  Synthetic peptide
SYAMS

SEQ ID NO: 617 - protein, 17 aa, Artificial Sequence
  Synthetic peptide
AISGSGGRTFYAESVEG

SEQ ID NO: 618 - protein, 11 aa, Artificial Sequence
  Synthetic peptide
HDYSNYPYFDY

SEQ ID NO: 619 - protein, 12 aa, Artificial Sequence
  Synthetic peptide
RASQSVRSSYLA

SEQ ID NO: 620 - protein, 7 aa, Artificial Sequence
  Synthetic peptide
GASSRAT

SEQ ID NO: 621 - protein, 9 aa, Artificial Sequence
  Synthetic peptide
QQYGSSPFT

SEQ ID NO: 622 - protein, 120 aa, Artificial Sequence
  Synthetic peptide
EVQLLESGGGMVQPGGSLRLSCAASGFTFSSYAMSWVRQAPGKCLEWVSAISGSGGRTFYAESVEGRFTISRDNSKNTLFLQMNSLRAEDTAVYYCAKHDYSNYPYFDYWGQGTLVTVSS

SEQ ID NO: 623 - protein, 108 aa, Artificial Sequence
  Synthetic peptide
EIVLTQSPGTLSLSPGERATLSCRASQSVRSSYLAWYQQKPGQAPRLLIYGASSRATGIPDRFSGSGSGTDFTLTISRLEPEDFAVYYCQQYGSSPFTFGCGTKLEIK

SEQ ID NO: 624 - protein, 243 aa, Artificial Sequence
  Synthetic peptide
EVQLLESGGGMVQPGGSLRLSCAASGFTFSSYAMSWVRQAPGKCLEWVSAISGSGGRTFYAESVEGRFTISRDNSKNTLFLQMNSLRAEDTAVYYCAKHDYSNYPYFDYWGQGTLVTVSSGGGGSGGGGSGGGGSEIVLTQSPGTLSLSPGERATLSCRASQSVRSSYLAWYQQKPGQAPRLLIYGASSRATGIPDRFSGSGSGTDFTLTISRLEPEDFAVYYCQQYGSSPFTFGCGTKLEIK

SEQ ID NO: 625 - protein, 498 aa, Artificial Sequence
  Synthetic peptide
EVQLLESGGGMVQPGGSLRLSCAASGFTFSSYAMSWVRQAPGKCLEWVSAISGSGGRTFYAESVEGRFTISRDNSKNTLFLQMNSLRAEDTAVYYCAKHDYSNYPYFDYWGQGTLVTVSSGGGGSGGGGSGGGGSEIVLTQSPGTLSLSPGERATLSCRASQSVRSSYLAWYQQKPGQAPRLLIYGASSRATGIPDRFSGSGSGTDFTLTISRLEPEDFAVYYCQQYGSSPFTFGCGTKLEIKSGGGGSEVQLVESGGGLVQPGGSLKLSCAASGFTFNKYAMNWVRQAPGKGLEWVARIRSKYNNYATYYADSVKDRFTISRDDSKNTAYLQMNNLKTEDTAVYYCVRHGNFGNSYISYWAYWGQGTLVTVSSGGGGSGGGGSGGGGSQTVVTQEPSLTVSPGGTVTLTCGSSTGAVTSGNYPNWVQQKPGQAPRGLIGGTKFLAPGTPARFSGSLLGGKAALTLSGVQPEDEAEYYCVLWYSNRWVFGGGTKLTVL

SEQ ID NO: 626 - protein, 986 aa, Artificial Sequence
  Synthetic peptide
EVQLLESGGGMVQPGGSLRLSCAASGFTFSSYAMSWVRQAPGKCLEWVSAISGSGGRTFYAESVEGRFTISRDNSKNTLFLQMNSLRAEDTAVYYCAKHDYSNYPYFDYWGQGTLVTVSSGGGGSGGGGSGGGGSEIVLTQSPGTLSLSPGERATLSCRASQSVRSSYLAWYQQKPGQAPRLLIYGASSRATGIPDRFSGSGSGTDFTLTISRLEPEDFAVYYCQQYGSSPFTFGCGTKLEIKSGGGGSEVQLVESGGGLVQPGGSLKLSCAASGFTFNKYAMNWVRQAPGKGLEWVARIRSKYNNYATYYADSVKDRFTISRDDSKNTAYLQMNNLKTEDTAVYYCVRHGNFGNSYISYWAYWGQGTLVTVSSGGGGSGGGGSGGGGSQTVVTQEPSLTVSPGGTVTLTCGSSTGAVTSGNYPNWVQQKPGQAPRGLIGGTKFLAPGTPARFSGSLLGGKAALTLSGVQPEDEAEYYCVLWYSNRWVFGGGTKLTVLGGGGDKTHTCPPCPAPELLGGPSVFLFPPKPKDTLMISRTPEVTCVVVDVSHEDPEVKFNWYVDGVEVHNAKTKPCEEQYGSTYRCVSVLTVLHQDWLNGKEYKCKVSNKALPAPIEKTISKAKGQPREPQVYTLPPSREEMTKNQVSLTCLVKGFYPSDIAVEWESNGQPENNYKTTPPVLDSDGSFFLYSKLTVDKSRWQQGNVFSCSVMHEALHNHYTQKSLSLSPGKGGGGSGGGGSGGGGSGGGGSGGGGSGGGGSDKTHTCPPCPAPELLGGPSVFLFPPKPKDTLMISRTPEVTCVVVDVSHEDPEVKFNWYVDGVEVHNAKTKPCEEQYGSTYRCVSVLTVLHQDWLNGKEYKCKVSNKALPAPIEKTISKAKGQPREPQVYTLPPSREEMTKNQVSLTCLVKGFYPSDIAVEWESNGQPENNYKTTPPVLDSDGSFFLYSKLTVDKSRWQQGNVFSCSVMHEALHNHYTQKSLSLSPGK

SEQ ID NO: 627 - protein, 120 aa, Artificial Sequence
  Synthetic peptide
EVQLLESGGGMVQPGGSLRLSCAASGFTFSSYAMSWVRQAPGKGLEWVSAISGSGGRTFYAESVEGRFTISRDNSKNTLFLQMNSLRAEDTAVYYCAKHDYSNYPYFDYWGQGTLVTVSS

SEQ ID NO: 628 - protein, 108 aa, Artificial Sequence
  Synthetic peptide
EIVLTQSPGTLSLSPGERATLSCRASQSVRSSYLAWYQQKPGQAPRLLIYGASSRATGIPDRFSGSGSGTDFTLTISRLEPEDFAVYYCQQYGSSPFTFGPGTKLEIK

SEQ ID NO: 629 - protein, 243 aa, Artificial Sequence
  Synthetic peptide
EVQLLESGGGMVQPGGSLRLSCAASGFTFSSYAMSWVRQAPGKGLEWVSAISGSGGRTFYAESVEGRFTISRDNSKNTLFLQMNSLRAEDTAVYYCAKHDYSNYPYFDYWGQGTLVTVSSGGGGSGGGGSGGGGSEIVLTQSPGTLSLSPGERATLSCRASQSVRSSYLAWYQQKPGQAPRLLIYGASSRATGIPDRFSGSGSGTDFTLTISRLEPEDFAVYYCQQYGSSPFTFGPGTKLEIK

SEQ ID NO: 630 - protein, 498 aa, Artificial Sequence
  Synthetic peptide
EVQLLESGGGMVQPGGSLRLSCAASGFTFSSYAMSWVRQAPGKGLEWVSAISGSGGRTFYAESVEGRFTISRDNSKNTLFLQMNSLRAEDTAVYYCAKHDYSNYPYFDYWGQGTLVTVSSGGGGSGGGGSGGGGSEIVLTQSPGTLSLSPGERATLSCRASQSVRSSYLAWYQQKPGQAPRLLIYGASSRATGIPDRFSGSGSGTDFTLTISRLEPEDFAVYYCQQYGSSPFTFGPGTKLEIKSGGGGSEVQLVESGGGLVQPGGSLKLSCAASGFTFNKYAMNWVRQAPGKGLEWVARIRSKYNNYATYYADSVKDRFTISRDDSKNTAYLQMNNLKTEDTAVYYCVRHGNFGNSYISYWAYWGQGTLVTVSSGGGGSGGGGSGGGGSQTVVTQEPSLTVSPGGTVTLTCGSSTGAVTSGNYPNWVQQKPGQAPRGLIGGTKFLAPGTPARFSGSLLGGKAALTLSGVQPEDEAEYYCVLWYSNRWVFGGGTKLTVL

SEQ ID NO: 631 - protein, 986 aa, Artificial Sequence
  Synthetic peptide
EVQLLESGGGMVQPGGSLRLSCAASGFTFSSYAMSWVRQAPGKGLEWVSAISGSGGRTFYAESVEGRFTISRDNSKNTLFLQMNSLRAEDTAVYYCAKHDYSNYPYFDYWGQGTLVTVSSGGGGSGGGGSGGGGSEIVLTQSPGTLSLSPGERATLSCRASQSVRSSYLAWYQQKPGQAPRLLIYGASSRATGIPDRFSGSGSGTDFTLTISRLEPEDFAVYYCQQYGSSPFTFGPGTKLEIKSGGGGSEVQLVESGGGLVQPGGSLKLSCAASGFTFNKYAMNWVRQAPGKGLEWVARIRSKYNNYATYYADSVKDRFTISRDDSKNTAYLQMNNLKTEDTAVYYCVRHGNFGNSYISYWAYWGQGTLVTVSSGGGGSGGGGSGGGGSQTVVTQEPSLTVSPGGTVTLTCGSSTGAVTSGNYPNWVQQKPGQAPRGLIGGTKFLAPGTPARFSGSLLGGKAALTLSGVQPEDEAEYYCVLWYSNRWVFGGGTKLTVLGGGGDKTHTCPPCPAPELLGGPSVFLFPPKPKDTLMISRTPEVTCVVVDVSHEDPEVKFNWYVDGVEVHNAKTKPCEEQYGSTYRCVSVLTVLHQDWLNGKEYKCKVSNKALPAPIEKTISKAKGQPREPQVYTLPPSREEMTKNQVSLTCLVKGFYPSDIAVEWESNGQPENNYKTTPPVLDSDGSFFLYSKLTVDKSRWQQGNVFSCSVMHEALHNHYTQKSLSLSPGKGGGGSGGGGSGGGGSGGGGSGGGGSGGGGSDKTHTCPPCPAPELLGGPSVFLFPPKPKDTLMISRTPEVTCVVVDVSHEDPEVKFNWYVDGVEVHNAKTKPCEEQYGSTYRCVSVLTVLHQDWLNGKEYKCKVSNKALPAPIEKTISKAKGQPREPQVYTLPPSREEMTKNQVSLTCLVKGFYPSDIAVEWESNGQPENNYKTTPPVLDSDGSFFLYSKLTVDKSRWQQGNVFSCSVMHEALHNHYTQKSLSLSPGK

SEQ ID NO: 632 - protein, 5 aa, Artificial Sequence
  Synthetic peptide
SYAMS

SEQ ID NO: 633 - protein, 17 aa, Artificial Sequence
  Synthetic peptide
AISGSGGRTFYAESVEG

SEQ ID NO: 634 - protein, 11 aa, Artificial Sequence
  Synthetic peptide
HDYSNYPYFDY

SEQ ID NO: 635 - protein, 12 aa, Artificial Sequence
  Synthetic peptide
RASQSIRSSYLA

SEQ ID NO: 636 - protein, 7 aa, Artificial Sequence
  Synthetic peptide
GASSRAT

SEQ ID NO: 637 - protein, 9 aa, Artificial Sequence
  Synthetic peptide
QQYGDLPFT

SEQ ID NO: 638 - protein, 120 aa, Artificial Sequence
  Synthetic peptide
EVQLLESGGGMVQPGGSLRLSCAASGFTFSSYAMSWVRQAPGKCLEWVSAISGSGGRTFYAESVEGRFTISRDNSKNTLYLQMNSLRAEDTAVYYCAKHDYSNYPYFDYWGQGTLVTVSS

SEQ ID NO: 639 - protein, 108 aa, Artificial Sequence
  Synthetic peptide
EIVLTQSPGTLSLSPGERATLSCRASQSIRSSYLAWYQQKPGQAPRLLIYGASSRATGIPDRFSGSGSGTDFTLTISRLEPEDFAVYYCQQYGDLPFTFGCGTKLEIK

SEQ ID NO: 640 - protein, 243 aa, Artificial Sequence
  Synthetic peptide
EVQLLESGGGMVQPGGSLRLSCAASGFTFSSYAMSWVRQAPGKCLEWVSAISGSGGRTFYAESVEGRFTISRDNSKNTLYLQMNSLRAEDTAVYYCAKHDYSNYPYFDYWGQGTLVTVSSGGGGSGGGGSGGGGSEIVLTQSPGTLSLSPGERATLSCRASQSIRSSYLAWYQQKPGQAPRLLIYGASSRATGIPDRFSGSGSGTDFTLTISRLEPEDFAVYYCQQYGDLPFTFGCGTKLEIK

SEQ ID NO: 641 - protein, 498 aa, Artificial Sequence
  Synthetic peptide
EVQLLESGGGMVQPGGSLRLSCAASGFTFSSYAMSWVRQAPGKCLEWVSAISGSGGRTFYAESVEGRFTISRDNSKNTLYLQMNSLRAEDTAVYYCAKHDYSNYPYFDYWGQGTLVTVSSGGGGSGGGGSGGGGSEIVLTQSPGTLSLSPGERATLSCRASQSIRSSYLAWYQQKPGQAPRLLIYGASSRATGIPDRFSGSGSGTDFTLTISRLEPEDFAVYYCQQYGDLPFTFGCGTKLEIKSGGGGSEVQLVESGGGLVQPGGSLKLSCAASGFTFNKYAMNWVRQAPGKGLEWVARIRSKYNNYATYYADSVKDRFTISRDDSKNTAYLQMNNLKTEDTAVYYCVRHGNFGNSYISYWAYWGQGTLVTVSSGGGGSGGGGSGGGGSQTVVTQEPSLTVSPGGTVTLTCGSSTGAVTSGNYPNWVQQKPGQAPRGLIGGTKFLAPGTPARFSGSLLGGKAALTLSGVQPEDEAEYYCVLWYSNRWVFGGGTKLTVL

SEQ ID NO: 642 - protein, 986 aa, Artificial Sequence
  Synthetic peptide
EVQLLESGGGMVQPGGSLRLSCAASGFTFSSYAMSWVRQAPGKCLEWVSAISGSGGRTFYAESVEGRFTISRDNSKNTLYLQMNSLRAEDTAVYYCAKHDYSNYPYFDYWGQGTLVTVSSGGGGSGGGGSGGGGSEIVLTQSPGTLSLSPGERATLSCRASQSIRSSYLAWYQQKPGQAPRLLIYGASSRATGIPDRFSGSGSGTDFTLTISRLEPEDFAVYYCQQYGDLPFTFGCGTKLEIKSGGGGSEVQLVESGGGLVQPGGSLKLSCAASGFTFNKYAMNWVRQAPGKGLEWVARIRSKYNNYATYYADSVKDRFTISRDDSKNTAYLQMNNLKTEDTAVYYCVRHGNFGNSYISYWAYWGQGTLVTVSSGGGGSGGGGSGGGGSQTVVTQEPSLTVSPGGTVTLTCGSSTGAVTSGNYPNWVQQKPGQAPRGLIGGTKFLAPGTPARFSGSLLGGKAALTLSGVQPEDEAEYYCVLWYSNRWVFGGGTKLTVLGGGGDKTHTCPPCPAPELLGGPSVFLFPPKPKDTLMISRTPEVTCVVVDVSHEDPEVKFNWYVDGVEVHNAKTKPCEEQYGSTYRCVSVLTVLHQDWLNGKEYKCKVSNKALPAPIEKTISKAKGQPREPQVYTLPPSREEMTKNQVSLTCLVKGFYPSDIAVEWESNGQPENNYKTTPPVLDSDGSFFLYSKLTVDKSRWQQGNVFSCSVMHEALHNHYTQKSLSLSPGKGGGGSGGGGSGGGGSGGGGSGGGGSGGGGSDKTHTCPPCPAPELLGGPSVFLFPPKPKDTLMISRTPEVTCVVVDVSHEDPEVKFNWYVDGVEVHNAKTKPCEEQYGSTYRCVSVLTVLHQDWLNGKEYKCKVSNKALPAPIEKTISKAKGQPREPQVYTLPPSREEMTKNQVSLTCLVKGFYPSDIAVEWESNGQPENNYKTTPPVLDSDGSFFLYSKLTVDKSRWQQGNVFSCSVMHEALHNHYTQKSLSLSPGK

SEQ ID NO: 643 - protein, 120 aa, Artificial Sequence
  Synthetic peptide
EVQLLESGGGMVQPGGSLRLSCAASGFTFSSYAMSWVRQAPGKGLEWVSAISGSGGRTFYAESVEGRFTISRDNSKNTLYLQMNSLRAEDTAVYYCAKHDYSNYPYFDYWGQGTLVTVSS

SEQ ID NO: 644 - protein, 108 aa, Artificial Sequence
  Synthetic peptide
EIVLTQSPGTLSLSPGERATLSCRASQSIRSSYLAWYQQKPGQAPRLLIYGASSRATGIPDRFSGSGSGTDFTLTISRLEPEDFAVYYCQQYGDLPFTFGPGTKLEIK

SEQ ID NO: 645 - protein, 243 aa, Artificial Sequence
  Synthetic peptide
EVQLLESGGGMVQPGGSLRLSCAASGFTFSSYAMSWVRQAPGKGLEWVSAISGSGGRTFYAESVEGRFTISRDNSKNTLYLQMNSLRAEDTAVYYCAKHDYSNYPYFDYWGQGTLVTVSSGGGGSGGGGSGGGGSEIVLTQSPGTLSLSPGERATLSCRASQSIRSSYLAWYQQKPGQAPRLLIYGASSRATGIPDRFSGSGSGTDFTLTISRLEPEDFAVYYCQQYGDLPFTFGPGTKLEIK

SEQ ID NO: 646 - protein, 498 aa, Artificial Sequence
  Synthetic peptide
EVQLLESGGGMVQPGGSLRLSCAASGFTFSSYAMSWVRQAPGKGLEWVSAISGSGGRTFYAESVEGRFTISRDNSKNTLYLQMNSLRAEDTAVYYCAKHDYSNYPYFDYWGQGTLVTVSSGGGGSGGGGSGGGGSEIVLTQSPGTLSLSPGERATLSCRASQSIRSSYLAWYQQKPGQAPRLLIYGASSRATGIPDRFSGSGSGTDFTLTISRLEPEDFAVYYCQQYGDLPFTFGPGTKLEIKSGGGGSEVQLVESGGGLVQPGGSLKLSCAASGFTFNKYAMNWVRQAPGKGLEWVARIRSKYNNYATYYADSVKDRFTISRDDSKNTAYLQMNNLKTEDTAVYYCVRHGNFGNSYISYWAYWGQGTLVTVSSGGGGSGGGGSGGGGSQTVVTQEPSLTVSPGGTVTLTCGSSTGAVTSGNYPNWVQQKPGQAPRGLIGGTKFLAPGTPARFSGSLLGGKAALTLSGVQPEDEAEYYCVLWYSNRWVFGGGTKLTVL

SEQ ID NO: 647 - protein, 986 aa, Artificial Sequence
  Synthetic peptide
EVQLLESGGGMVQPGGSLRLSCAASGFTFSSYAMSWVRQAPGKGLEWVSAISGSGGRTFYAESVEGRFTISRDNSKNTLYLQMNSLRAEDTAVYYCAKHDYSNYPYFDYWGQGTLVTVSSGGGGSGGGGSGGGGSEIVLTQSPGTLSLSPGERATLSCRASQSIRSSYLAWYQQKPGQAPRLLIYGASSRATGIPDRFSGSGSGTDFTLTISRLEPEDFAVYYCQQYGDLPFTFGPGTKLEIKSGGGGSEVQLVESGGGLVQPGGSLKLSCAASGFTFNKYAMNWVRQAPGKGLEWVARIRSKYNNYATYYADSVKDRFTISRDDSKNTAYLQMNNLKTEDTAVYYCVRHGNFGNSYISYWAYWGQGTLVTVSSGGGGSGGGGSGGGGSQTVVTQEPSLTVSPGGTVTLTCGSSTGAVTSGNYPNWVQQKPGQAPRGLIGGTKFLAPGTPARFSGSLLGGKAALTLSGVQPEDEAEYYCVLWYSNRWVFGGGTKLTVLGGGGDKTHTCPPCPAPELLGGPSVFLFPPKPKDTLMISRTPEVTCVVVDVSHEDPEVKFNWYVDGVEVHNAKTKPCEEQYGSTYRCVSVLTVLHQDWLNGKEYKCKVSNKALPAPIEKTISKAKGQPREPQVYTLPPSREEMTKNQVSLTCLVKGFYPSDIAVEWESNGQPENNYKTTPPVLDSDGSFFLYSKLTVDKSRWQQGNVFSCSVMHEALHNHYTQKSLSLSPGKGGGGSGGGGSGGGGSGGGGSGGGGSGGGGSDKTHTCPPCPAPELLGGPSVFLFPPKPKDTLMISRTPEVTCVVVDVSHEDPEVKFNWYVDGVEVHNAKTKPCEEQYGSTYRCVSVLTVLHQDWLNGKEYKCKVSNKALPAPIEKTISKAKGQPREPQVYTLPPSREEMTKNQVSLTCLVKGFYPSDIAVEWESNGQPENNYKTTPPVLDSDGSFFLYSKLTVDKSRWQQGNVFSCSVMHEALHNHYTQKSLSLSPGK

SEQ ID NO: 648 - protein, 5 aa, Artificial Sequence
  Synthetic peptide
SYAMS

SEQ ID NO: 649 - protein, 17 aa, Artificial Sequence
  Synthetic peptide
AISGSGGRTHYAESVKG

SEQ ID NO: 650 - protein, 11 aa, Artificial Sequence
  Synthetic peptide
HDYSNYPYFDY

SEQ ID NO: 651 - protein, 12 aa, Artificial Sequence
  Synthetic peptide
RASQSVRSSYLA

SEQ ID NO: 652 - protein, 7 aa, Artificial Sequence
  Synthetic peptide
GASSRAT

SEQ ID NO: 653 - protein, 9 aa, Artificial Sequence
  Synthetic peptide
QQYGSSPFT

SEQ ID NO: 654 - protein, 120 aa, Artificial Sequence
  Synthetic peptide
EVQLLESGGGLVQSGGSLRLSCAASGFTFSSYAMSWVRQAPGKCLEWVSAISGSGGRTHYAESVKGRFTISRDNSKNTLYLQMNSLRAEDTAVYYCAKHDYSNYPYFDYWGQGTLVTVSS

SEQ ID NO: 655 - protein, 108 aa, Artificial Sequence; identical to SEQ ID NO: 623
  Synthetic peptide

SEQ ID NO: 656 - protein, 243 aa, Artificial Sequence
  Synthetic peptide
EVQLLESGGGLVQSGGSLRLSCAASGFTFSSYAMSWVRQAPGKCLEWVSAISGSGGRTHYAESVKGRFTISRDNSKNTLYLQMNSLRAEDTAVYYCAKHDYSNYPYFDYWGQGTLVTVSSGGGGSGGGGSGGGGSEIVLTQSPGTLSLSPGERATLSCRASQSVRSSYLAWYQQKPGQAPRLLIYGASSRATGIPDRFSGSGSGTDFTLTISRLEPEDFAVYYCQQYGSSPFTFGCGTKLEIK

SEQ ID NO: 657 - protein, 498 aa, Artificial Sequence
  Synthetic peptide
EVQLLESGGGLVQSGGSLRLSCAASGFTFSSYAMSWVRQAPGKCLEWVSAISGSGGRTHYAESVKGRFTISRDNSKNTLYLQMNSLRAEDTAVYYCAKHDYSNYPYFDYWGQGTLVTVSSGGGGSGGGGSGGGGSEIVLTQSPGTLSLSPGERATLSCRASQSVRSSYLAWYQQKPGQAPRLLIYGASSRATGIPDRFSGSGSGTDFTLTISRLEPEDFAVYYCQQYGSSPFTFGCGTKLEIKSGGGGSEVQLVESGGGLVQPGGSLKLSCAASGFTFNKYAMNWVRQAPGKGLEWVARIRSKYNNYATYYADSVKDRFTISRDDSKNTAYLQMNNLKTEDTAVYYCVRHGNFGNSYISYWAYWGQGTLVTVSSGGGGSGGGGSGGGGSQTVVTQEPSLTVSPGGTVTLTCGSSTGAVTSGNYPNWVQQKPGQAPRGLIGGTKFLAPGTPARFSGSLLGGKAALTLSGVQPEDEAEYYCVLWYSNRWVFGGGTKLTVL

SEQ ID NO: 658 - protein, 986 aa, Artificial Sequence
  Synthetic peptide
EVQLLESGGGLVQSGGSLRLSCAASGFTFSSYAMSWVRQAPGKCLEWVSAISGSGGRTHYAESVKGRFTISRDNSKNTLYLQMNSLRAEDTAVYYCAKHDYSNYPYFDYWGQGTLVTVSSGGGGSGGGGSGGGGSEIVLTQSPGTLSLSPGERATLSCRASQSVRSSYLAWYQQKPGQAPRLLIYGASSRATGIPDRFSGSGSGTDFTLTISRLEPEDFAVYYCQQYGSSPFTFGCGTKLEIKSGGGGSEVQLVESGGGLVQPGGSLKLSCAASGFTFNKYAMNWVRQAPGKGLEWVARIRSKYNNYATYYADSVKDRFTISRDDSKNTAYLQMNNLKTEDTAVYYCVRHGNFGNSYISYWAYWGQGTLVTVSSGGGGSGGGGSGGGGSQTVVTQEPSLTVSPGGTVTLTCGSSTGAVTSGNYPNWVQQKPGQAPRGLIGGTKFLAPGTPARFSGSLLGGKAALTLSGVQPEDEAEYYCVLWYSNRWVFGGGTKLTVLGGGGDKTHTCPPCPAPELLGGPSVFLFPPKPKDTLMISRTPEVTCVVVDVSHEDPEVKFNWYVDGVEVHNAKTKPCEEQYGSTYRCVSVLTVLHQDWLNGKEYKCKVSNKALPAPIEKTISKAKGQPREPQVYTLPPSREEMTKNQVSLTCLVKGFYPSDIAVEWESNGQPENNYKTTPPVLDSDGSFFLYSKLTVDKSRWQQGNVFSCSVMHEALHNHYTQKSLSLSPGKGGGGSGGGGSGGGGSGGGGSGGGGSGGGGSDKTHTCPPCPAPELLGGPSVFLFPPKPKDTLMISRTPEVTCVVVDVSHEDPEVKFNWYVDGVEVHNAKTKPCEEQYGSTYRCVSVLTVLHQDWLNGKEYKCKVSNKALPAPIEKTISKAKGQPREPQVYTLPPSREEMTKNQVSLTCLVKGFYPSDIAVEWESNGQPENNYKTTPPVLDSDGSFFLYSKLTVDKSRWQQGNVFSCSVMHEALHNHYTQKSLSLSPGK

SEQ ID NO: 659 - protein, 120 aa, Artificial Sequence
  Synthetic peptide
EVQLLESGGGLVQSGGSLRLSCAASGFTFSSYAMSWVRQAPGKGLEWVSAISGSGGRTHYAESVKGRFTISRDNSKNTLYLQMNSLRAEDTAVYYCAKHDYSNYPYFDYWGQGTLVTVSS

SEQ ID NO: 660 - protein, 108 aa, Artificial Sequence; identical to SEQ ID NO: 628
  Synthetic peptide

SEQ ID NO: 661 - protein, 243 aa, Artificial Sequence
  Synthetic peptide
EVQLLESGGGLVQSGGSLRLSCAASGFTFSSYAMSWVRQAPGKGLEWVSAISGSGGRTHYAESVKGRFTISRDNSKNTLYLQMNSLRAEDTAVYYCAKHDYSNYPYFDYWGQGTLVTVSSGGGGSGGGGSGGGGSEIVLTQSPGTLSLSPGERATLSCRASQSVRSSYLAWYQQKPGQAPRLLIYGASSRATGIPDRFSGSGSGTDFTLTISRLEPEDFAVYYCQQYGSSPFTFGPGTKLEIK

SEQ ID NO: 662 - protein, 498 aa, Artificial Sequence
  Synthetic peptide
EVQLLESGGGLVQSGGSLRLSCAASGFTFSSYAMSWVRQAPGKGLEWVSAISGSGGRTHYAESVKGRFTISRDNSKNTLYLQMNSLRAEDTAVYYCAKHDYSNYPYFDYWGQGTLVTVSSGGGGSGGGGSGGGGSEIVLTQSPGTLSLSPGERATLSCRASQSVRSSYLAWYQQKPGQAPRLLIYGASSRATGIPDRFSGSGSGTDFTLTISRLEPEDFAVYYCQQYGSSPFTFGPGTKLEIKSGGGGSEVQLVESGGGLVQPGGSLKLSCAASGFTFNKYAMNWVRQAPGKGLEWVARIRSKYNNYATYYADSVKDRFTISRDDSKNTAYLQMNNLKTEDTAVYYCVRHGNFGNSYISYWAYWGQGTLVTVSSGGGGSGGGGSGGGGSQTVVTQEPSLTVSPGGTVTLTCGSSTGAVTSGNYPNWVQQKPGQAPRGLIGGTKFLAPGTPARFSGSLLGGKAALTLSGVQPEDEAEYYCVLWYSNRWVFGGGTKLTVL

SEQ ID NO: 663 - protein, 986 aa, Artificial Sequence
  Synthetic peptide
EVQLLESGGGLVQSGGSLRLSCAASGFTFSSYAMSWVRQAPGKGLEWVSAISGSGGRTHYAESVKGRFTISRDNSKNTLYLQMNSLRAEDTAVYYCAKHDYSNYPYFDYWGQGTLVTVSSGGGGSGGGGSGGGGSEIVLTQSPGTLSLSPGERATLSCRASQSVRSSYLAWYQQKPGQAPRLLIYGASSRATGIPDRFSGSGSGTDFTLTISRLEPEDFAVYYCQQYGSSPFTFGPGTKLEIKSGGGGSEVQLVESGGGLVQPGGSLKLSCAASGFTFNKYAMNWVRQAPGKGLEWVARIRSKYNNYATYYADSVKDRFTISRDDSKNTAYLQMNNLKTEDTAVYYCVRHGNFGNSYISYWAYWGQGTLVTVSSGGGGSGGGGSGGGGSQTVVTQEPSLTVSPGGTVTLTCGSSTGAVTSGNYPNWVQQKPGQAPRGLIGGTKFLAPGTPARFSGSLLGGKAALTLSGVQPEDEAEYYCVLWYSNRWVFGGGTKLTVLGGGGDKTHTCPPCPAPELLGGPSVFLFPPKPKDTLMISRTPEVTCVVVDVSHEDPEVKFNWYVDGVEVHNAKTKPCEEQYGSTYRCVSVLTVLHQDWLNGKEYKCKVSNKALPAPIEKTISKAKGQPREPQVYTLPPSREEMTKNQVSLTCLVKGFYPSDIAVEWESNGQPENNYKTTPPVLDSDGSFFLYSKLTVDKSRWQQGNVFSCSVMHEALHNHYTQKSLSLSPGKGGGGSGGGGSGGGGSGGGGSGGGGSGGGGSDKTHTCPPCPAPELLGGPSVFLFPPKPKDTLMISRTPEVTCVVVDVSHEDPEVKFNWYVDGVEVHNAKTKPCEEQYGSTYRCVSVLTVLHQDWLNGKEYKCKVSNKALPAPIEKTISKAKGQPREPQVYTLPPSREEMTKNQVSLTCLVKGFYPSDIAVEWESNGQPENNYKTTPPVLDSDGSFFLYSKLTVDKSRWQQGNVFSCSVMHEALHNHYTQKSLSLSPGK

SEQ ID NO: 664 - protein, 5 aa, Artificial Sequence
  Synthetic peptide
SYAMS

SEQ ID NO: 665 - protein, 17 aa, Artificial Sequence
  Synthetic peptide
LISGSGGRTHYAESVKG

SEQ ID NO: 666 - protein, 11 aa, Artificial Sequence
  Synthetic peptide
HDYSNYPYFDY

SEQ ID NO: 667 - protein, 12 aa, Artificial Sequence
  Synthetic peptide
RASQSVRSTYLA

SEQ ID NO: 668 - protein, 7 aa, Artificial Sequence
  Synthetic peptide
DASSRAT

SEQ ID NO: 669 - protein, 9 aa, Artificial Sequence
  Synthetic peptide
QQYGSSPPT

SEQ ID NO: 670 - protein, 120 aa, Artificial Sequence
  Synthetic peptide
EVQLLESGGGLVQPGGSLRLSCAASGFTFSSYAMSWVRQAPGKCLEWVSLISGSGGRTHYAESVKGRFTISRDNSKNTLYLQMNSLRAEDTAVYYCAKHDYSNYPYFDYWGQGTLVTVSS

SEQ ID NO: 671 - protein, 108 aa, Artificial Sequence
  Synthetic peptide
EIVLTQSPGTLSLSPGERATLSCRASQSVRSTYLAWYQQKPGQAPRLLIYDASSRATGIPDRFSGSGSGTDFTLTISRLEPEDFAVYFCQQYGSSPPTFGCGTKLEIK

SEQ ID NO: 672 - protein, 243 aa, Artificial Sequence
  Synthetic peptide
EVQLLESGGGLVQPGGSLRLSCAASGFTFSSYAMSWVRQAPGKCLEWVSLISGSGGRTHYAESVKGRFTISRDNSKNTLYLQMNSLRAEDTAVYYCAKHDYSNYPYFDYWGQGTLVTVSSGGGGSGGGGSGGGGSEIVLTQSPGTLSLSPGERATLSCRASQSVRSTYLAWYQQKPGQAPRLLIYDASSRATGIPDRFSGSGSGTDFTLTISRLEPEDFAVYFCQQYGSSPPTFGCGTKLEIK

SEQ ID NO: 673 - protein, 498 aa, Artificial Sequence
  Synthetic peptide
EVQLLESGGGLVQPGGSLRLSCAASGFTFSSYAMSWVRQAPGKCLEWVSLISGSGGRTHYAESVKGRFTISRDNSKNTLYLQMNSLRAEDTAVYYCAKHDYSNYPYFDYWGQGTLVTVSSGGGGSGGGGSGGGGSEIVLTQSPGTLSLSPGERATLSCRASQSVRSTYLAWYQQKPGQAPRLLIYDASSRATGIPDRFSGSGSGTDFTLTISRLEPEDFAVYFCQQYGSSPPTFGCGTKLEIKSGGGGSEVQLVESGGGLVQPGGSLKLSCAASGFTFNKYAMNWVRQAPGKGLEWVARIRSKYNNYATYYADSVKDRFTISRDDSKNTAYLQMNNLKTEDTAVYYCVRHGNFGNSYISYWAYWGQGTLVTVSSGGGGSGGGGSGGGGSQTVVTQEPSLTVSPGGTVTLTCGSSTGAVTSGNYPNWVQQKPGQAPRGLIGGTKFLAPGTPARFSGSLLGGKAALTLSGVQPEDEAEYYCVLWYSNRWVFGGGTKLTVL

SEQ ID NO: 674 - protein, 986 aa, Artificial Sequence
  Synthetic peptide
EVQLLESGGGLVQPGGSLRLSCAASGFTFSSYAMSWVRQAPGKCLEWVSLISGSGGRTHYAESVKGRFTISRDNSKNTLYLQMNSLRAEDTAVYYCAKHDYSNYPYFDYWGQGTLVTVSSGGGGSGGGGSGGGGSEIVLTQSPGTLSLSPGERATLSCRASQSVRSTYLAWYQQKPGQAPRLLIYDASSRATGIPDRFSGSGSGTDFTLTISRLEPEDFAVYFCQQYGSSPPTFGCGTKLEIKSGGGGSEVQLVESGGGLVQPGGSLKLSCAASGFTFNKYAMNWVRQAPGKGLEWVARIRSKYNNYATYYADSVKDRFTISRDDSKNTAYLQMNNLKTEDTAVYYCVRHGNFGNSYISYWAYWGQGTLVTVSSGGGGSGGGGSGGGGSQTVVTQEPSLTVSPGGTVTLTCGSSTGAVTSGNYPNWVQQKPGQAPRGLIGGTKFLAPGTPARFSGSLLGGKAALTLSGVQPEDEAEYYCVLWYSNRWVFGGGTKLTVLGGGGDKTHTCPPCPAPELLGGPSVFLFPPKPKDTLMISRTPEVTCVVVDVSHEDPEVKFNWYVDGVEVHNAKTKPCEEQYGSTYRCVSVLTVLHQDWLNGKEYKCKVSNKALPAPIEKTISKAKGQPREPQVYTLPPSREEMTKNQVSLTCLVKGFYPSDIAVEWESNGQPENNYKTTPPVLDSDGSFFLYSKLTVDKSRWQQGNVFSCSVMHEALHNHYTQKSLSLSPGKGGGGSGGGGSGGGGSGGGGSGGGGSGGGGSDKTHTCPPCPAPELLGGPSVFLFPPKPKDTLMISRTPEVTCVVVDVSHEDPEVKFNWYVDGVEVHNAKTKPCEEQYGSTYRCVSVLTVLHQDWLNGKEYKCKVSNKALPAPIEKTISKAKGQPREPQVYTLPPSREEMTKNQVSLTCLVKGFYPSDIAVEWESNGQPENNYKTTPPVLDSDGSFFLYSKLTVDKSRWQQGNVFSCSVMHEALHNHYTQKSLSLSPGK

SEQ ID NO: 675 - protein, 120 aa, Artificial Sequence
  Synthetic peptide
EVQLLESGGGLVQPGGSLRLSCAASGFTFSSYAMSWVRQAPGKGLEWVSLISGSGGRTHYAESVKGRFTISRDNSKNTLYLQMNSLRAEDTAVYYCAKHDYSNYPYFDYWGQGTLVTVSS

SEQ ID NO: 676 - protein, 108 aa, Artificial Sequence
  Synthetic peptide
EIVLTQSPGTLSLSPGERATLSCRASQSVRSTYLAWYQQKPGQAPRLLIYDASSRATGIPDRFSGSGSGTDFTLTISRLEPEDFAVYFCQQYGSSPPTFGGGTKLEIK

SEQ ID NO: 677 - protein, 243 aa, Artificial Sequence
  Synthetic peptide
EVQLLESGGGLVQPGGSLRLSCAASGFTFSSYAMSWVRQAPGKGLEWVSLISGSGGRTHYAESVKGRFTISRDNSKNTLYLQMNSLRAEDTAVYYCAKHDYSNYPYFDYWGQGTLVTVSSGGGGSGGGGSGGGGSEIVLTQSPGTLSLSPGERATLSCRASQSVRSTYLAWYQQKPGQAPRLLIYDASSRATGIPDRFSGSGSGTDFTLTISRLEPEDFAVYFCQQYGSSPPTFGGGTKLEIK

SEQ ID NO: 678 - protein, 498 aa, Artificial Sequence
  Synthetic peptide
EVQLLESGGGLVQPGGSLRLSCAASGFTFSSYAMSWVRQAPGKGLEWVSLISGSGGRTHYAESVKGRFTISRDNSKNTLYLQMNSLRAEDTAVYYCAKHDYSNYPYFDYWGQGTLVTVSSGGGGSGGGGSGGGGSEIVLTQSPGTLSLSPGERATLSCRASQSVRSTYLAWYQQKPGQAPRLLIYDASSRATGIPDRFSGSGSGTDFTLTISRLEPEDFAVYFCQQYGSSPPTFGGGTKLEIKSGGGGSEVQLVESGGGLVQPGGSLKLSCAASGFTFNKYAMNWVRQAPGKGLEWVARIRSKYNNYATYYADSVKDRFTISRDDSKNTAYLQMNNLKTEDTAVYYCVRHGNFGNSYISYWAYWGQGTLVTVSSGGGGSGGGGSGGGGSQTVVTQEPSLTVSPGGTVTLTCGSSTGAVTSGNYPNWVQQKPGQAPRGLIGGTKFLAPGTPARFSGSLLGGKAALTLSGVQPEDEAEYYCVLWYSNRWVFGGGTKLTVL

SEQ ID NO: 679 - protein, 986 aa, Artificial Sequence
  Synthetic peptide
EVQLLESGGGLVQPGGSLRLSCAASGFTFSSYAMSWVRQAPGKGLEWVSLISGSGGRTHYAESVKGRFTISRDNSKNTLYLQMNSLRAEDTAVYYCAKHDYSNYPYFDYWGQGTLVTVSSGGGGSGGGGSGGGGSEIVLTQSPGTLSLSPGERATLSCRASQSVRSTYLAWYQQKPGQAPRLLIYDASSRATGIPDRFSGSGSGTDFTLTISRLEPEDFAVYFCQQYGSSPPTFGGGTKLEIKSGGGGSEVQLVESGGGLVQPGGSLKLSCAASGFTFNKYAMNWVRQAPGKGLEWVARIRSKYNNYATYYADSVKDRFTISRDDSKNTAYLQMNNLKTEDTAVYYCVRHGNFGNSYISYWAYWGQGTLVTVSSGGGGSGGGGSGGGGSQTVVTQEPSLTVSPGGTVTLTCGSSTGAVTSGNYPNWVQQKPGQAPRGLIGGTKFLAPGTPARFSGSLLGGKAALTLSGVQPEDEAEYYCVLWYSNRWVFGGGTKLTVLGGGGDKTHTCPPCPAPELLGGPSVFLFPPKPKDTLMISRTPEVTCVVVDVSHEDPEVKFNWYVDGVEVHNAKTKPCEEQYGSTYRCVSVLTVLHQDWLNGKEYKCKVSNKALPAPIEKTISKAKGQPREPQVYTLPPSREEMTKNQVSLTCLVKGFYPSDIAVEWESNGQPENNYKTTPPVLDSDGSFFLYSKLTVDKSRWQQGNVFSCSVMHEALHNHYTQKSLSLSPGKGGGGSGGGGSGGGGSGGGGSGGGGSGGGGSDKTHTCPPCPAPELLGGPSVFLFPPKPKDTLMISRTPEVTCVVVDVSHEDPEVKFNWYVDGVEVHNAKTKPCEEQYGSTYRCVSVLTVLHQDWLNGKEYKCKVSNKALPAPIEKTISKAKGQPREPQVYTLPPSREEMTKNQVSLTCLVKGFYPSDIAVEWESNGQPENNYKTTPPVLDSDGSFFLYSKLTVDKSRWQQGNVFSCSVMHEALHNHYTQKSLSLSPGK

SEQ ID NO: 680 - protein, 5 aa, Artificial Sequence
  Synthetic peptide
TYAMS

SEQ ID NO: 681 - protein, 17 aa, Artificial Sequence
  Synthetic peptide
AISGSGGSTFYAESVKG

SEQ ID NO: 682 - protein, 11 aa, Artificial Sequence
  Synthetic peptide
HDYSNYPYFDY

SEQ ID NO: 683 - protein, 12 aa, Artificial Sequence
  Synthetic peptide
RASQSVRSSYLA

SEQ ID NO: 684 - protein, 7 aa, Artificial Sequence
  Synthetic peptide
GASSRAT

SEQ ID NO: 685 - protein, 9 aa, Artificial Sequence
  Synthetic peptide
QQYGDLPFT

SEQ ID NO: 686 - protein, 120 aa, Artificial Sequence
  Synthetic peptide
EVQLLESGGGLVQPGGSLRLSCAASGFTFSTYAMSWVRQAPGKCLEWVSAISGSGGSTFYAESVKGRFTISRDNSKNTLSLQMNSLRAEDTAVYYCAKHDYSNYPYFDYWGQGTLVTVSS

SEQ ID NO: 687 - protein, 108 aa, Artificial Sequence; identical to SEQ ID NO: 607
  Synthetic peptide

SEQ ID NO: 688 - protein, 243 aa, Artificial Sequence
  Synthetic peptide
EVQLLESGGGLVQPGGSLRLSCAASGFTFSTYAMSWVRQAPGKCLEWVSAISGSGGSTFYAESVKGRFTISRDNSKNTLSLQMNSLRAEDTAVYYCAKHDYSNYPYFDYWGQGTLVTVSSGGGGSGGGGSGGGGSEIVLTQSPGTLSLSPGERATLSCRASQSVRSSYLAWYQQKPGQAPRLLIYGASSRATGIPDRFSGSGSGTDFTLTISRLEPEDFAVYYCQQYGDLPFTFGCGTKLEIK

SEQ ID NO: 689 - protein, 498 aa, Artificial Sequence
  Synthetic peptide
EVQLLESGGGLVQPGGSLRLSCAASGFTFSTYAMSWVRQAPGKCLEWVSAISGSGGSTFYAESVKGRFTISRDNSKNTLSLQMNSLRAEDTAVYYCAKHDYSNYPYFDYWGQGTLVTVSSGGGGSGGGGSGGGGSEIVLTQSPGTLSLSPGERATLSCRASQSVRSSYLAWYQQKPGQAPRLLIYGASSRATGIPDRFSGSGSGTDFTLTISRLEPEDFAVYYCQQYGDLPFTFGCGTKLEIKSGGGGSEVQLVESGGGLVQPGGSLKLSCAASGFTFNKYAMNWVRQAPGKGLEWVARIRSKYNNYATYYADSVKDRFTISRDDSKNTAYLQMNNLKTEDTAVYYCVRHGNFGNSYISYWAYWGQGTLVTVSSGGGGSGGGGSGGGGSQTVVTQEPSLTVSPGGTVTLTCGSSTGAVTSGNYPNWVQQKPGQAPRGLIGGTKFLAPGTPARFSGSLLGGKAALTLSGVQPEDEAEYYCVLWYSNRWVFGGGTKLTVL

SEQ ID NO: 690 - protein, 986 aa, Artificial Sequence
  Synthetic peptide
EVQLLESGGGLVQPGGSLRLSCAASGFTFSTYAMSWVRQAPGKCLEWVSAISGSGGSTFYAESVKGRFTISRDNSKNTLSLQMNSLRAEDTAVYYCAKHDYSNYPYFDYWGQGTLVTVSSGGGGSGGGGSGGGGSEIVLTQSPGTLSLSPGERATLSCRASQSVRSSYLAWYQQKPGQAPRLLIYGASSRATGIPDRFSGSGSGTDFTLTISRLEPEDFAVYYCQQYGDLPFTFGCGTKLEIKSGGGGSEVQLVESGGGLVQPGGSLKLSCAASGFTFNKYAMNWVRQAPGKGLEWVARIRSKYNNYATYYADSVKDRFTISRDDSKNTAYLQMNNLKTEDTAVYYCVRHGNFGNSYISYWAYWGQGTLVTVSSGGGGSGGGGSGGGGSQTVVTQEPSLTVSPGGTVTLTCGSSTGAVTSGNYPNWVQQKPGQAPRGLIGGTKFLAPGTPARFSGSLLGGKAALTLSGVQPEDEAEYYCVLWYSNRWVFGGGTKLTVLGGGGDKTHTCPPCPAPELLGGPSVFLFPPKPKDTLMISRTPEVTCVVVDVSHEDPEVKFNWYVDGVEVHNAKTKPCEEQYGSTYRCVSVLTVLHQDWLNGKEYKCKVSNKALPAPIEKTISKAKGQPREPQVYTLPPSREEMTKNQVSLTCLVKGFYPSDIAVEWESNGQPENNYKTTPPVLDSDGSFFLYSKLTVDKSRWQQGNVFSCSVMHEALHNHYTQKSLSLSPGKGGGGSGGGGSGGGGSGGGGSGGGGSGGGGSDKTHTCPPCPAPELLGGPSVFLFPPKPKDTLMISRTPEVTCVVVDVSHEDPEVKFNWYVDGVEVHNAKTKPCEEQYGSTYRCVSVLTVLHQDWLNGKEYKCKVSNKALPAPIEKTISKAKGQPREPQVYTLPPSREEMTKNQVSLTCLVKGFYPSDIAVEWESNGQPENNYKTTPPVLDSDGSFFLYSKLTVDKSRWQQGNVFSCSVMHEALHNHYTQKSLSLSPGK

SEQ ID NO: 691 - protein, 120 aa, Artificial Sequence
  Synthetic peptide
EVQLLESGGGLVQPGGSLRLSCAASGFTFSTYAMSWVRQAPGKGLEWVSAISGSGGSTFYAESVKGRFTISRDNSKNTLSLQMNSLRAEDTAVYYCAKHDYSNYPYFDYWGQGTLVTVSS

SEQ ID NO: 692 - protein, 108 aa, Artificial Sequence; identical to SEQ ID NO: 612
  Synthetic peptide

SEQ ID NO: 693 - protein, 243 aa, Artificial Sequence
  Synthetic peptide
EVQLLESGGGLVQPGGSLRLSCAASGFTFSTYAMSWVRQAPGKGLEWVSAISGSGGSTFYAESVKGRFTISRDNSKNTLSLQMNSLRAEDTAVYYCAKHDYSNYPYFDYWGQGTLVTVSSGGGGSGGGGSGGGGSEIVLTQSPGTLSLSPGERATLSCRASQSVRSSYLAWYQQKPGQAPRLLIYGASSRATGIPDRFSGSGSGTDFTLTISRLEPEDFAVYYCQQYGDLPFTFGPGTKLEIK

SEQ ID NO: 694 - protein, 498 aa, Artificial Sequence
  Synthetic peptide
EVQLLESGGGLVQPGGSLRLSCAASGFTFSTYAMSWVRQAPGKGLEWVSAISGSGGSTFYAESVKGRFTISRDNSKNTLSLQMNSLRAEDTAVYYCAKHDYSNYPYFDYWGQGTLVTVSSGGGGSGGGGSGGGGSEIVLTQSPGTLSLSPGERATLSCRASQSVRSSYLAWYQQKPGQAPRLLIYGASSRATGIPDRFSGSGSGTDFTLTISRLEPEDFAVYYCQQYGDLPFTFGPGTKLEIKSGGGGSEVQLVESGGGLVQPGGSLKLSCAASGFTFNKYAMNWVRQAPGKGLEWVARIRSKYNNYATYYADSVKDRFTISRDDSKNTAYLQMNNLKTEDTAVYYCVRHGNFGNSYISYWAYWGQGTLVTVSSGGGGSGGGGSGGGGSQTVVTQEPSLTVSPGGTVTLTCGSSTGAVTSGNYPNWVQQKPGQAPRGLIGGTKFLAPGTPARFSGSLLGGKAALTLSGVQPEDEAEYYCVLWYSNRWVFGGGTKLTVL

SEQ ID NO: 695 - protein, 986 aa, Artificial Sequence
  Synthetic peptide
EVQLLESGGGLVQPGGSLRLSCAASGFTFSTYAMSWVRQAPGKGLEWVSAISGSGGSTFYAESVKGRFTISRDNSKNTLSLQMNSLRAEDTAVYYCAKHDYSNYPYFDYWGQGTLVTVSSGGGGSGGGGSGGGGSEIVLTQSPGTLSLSPGERATLSCRASQSVRSSYLAWYQQKPGQAPRLLIYGASSRATGIPDRFSGSGSGTDFTLTISRLEPEDFAVYYCQQYGDLPFTFGPGTKLEIKSGGGGSEVQLVESGGGLVQPGGSLKLSCAASGFTFNKYAMNWVRQAPGKGLEWVARIRSKYNNYATYYADSVKDRFTISRDDSKNTAYLQMNNLKTEDTAVYYCVRHGNFGNSYISYWAYWGQGTLVTVSSGGGGSGGGGSGGGGSQTVVTQEPSLTVSPGGTVTLTCGSSTGAVTSGNYPNWVQQKPGQAPRGLIGGTKFLAPGTPARFSGSLLGGKAALTLSGVQPEDEAEYYCVLWYSNRWVFGGGTKLTVLGGGGDKTHTCPPCPAPELLGGPSVFLFPPKPKDTLMISRTPEVTCVVVDVSHEDPEVKFNWYVDGVEVHNAKTKPCEEQYGSTYRCVSVLTVLHQDWLNGKEYKCKVSNKALPAPIEKTISKAKGQPREPQVYTLPPSREEMTKNQVSLTCLVKGFYPSDIAVEWESNGQPENNYKTTPPVLDSDGSFFLYSKLTVDKSRWQQGNVFSCSVMHEALHNHYTQKSLSLSPGKGGGGSGGGGSGGGGSGGGGSGGGGSGGGGSDKTHTCPPCPAPELLGGPSVFLFPPKPKDTLMISRTPEVTCVVVDVSHEDPEVKFNWYVDGVEVHNAKTKPCEEQYGSTYRCVSVLTVLHQDWLNGKEYKCKVSNKALPAPIEKTISKAKGQPREPQVYTLPPSREEMTKNQVSLTCLVKGFYPSDIAVEWESNGQPENNYKTTPPVLDSDGSFFLYSKLTVDKSRWQQGNVFSCSVMHEALHNHYTQKSLSLSPGK

SEQ ID NO: 696 - protein, 5 aa, Artificial Sequence
  Synthetic peptide
TYAMS

SEQ ID NO: 697 - protein, 17 aa, Artificial Sequence
  Synthetic peptide
AISGSGGRTFYAESVEG

SEQ ID NO: 698 - protein, 11 aa, Artificial Sequence
  Synthetic peptide
HDYSNYPYFDY

SEQ ID NO: 699 - protein, 12 aa, Artificial Sequence
  Synthetic peptide
RASQSVRSTYLA

SEQ ID NO: 700 - protein, 7 aa, Artificial Sequence
  Synthetic peptide
GASSRAT

SEQ ID NO: 701 - protein, 9 aa, Artificial Sequence
  Synthetic peptide
QQYGDLPFT

SEQ ID NO: 702 - protein, 120 aa, Artificial Sequence
  Synthetic peptide
EVQLLESGGGMVQPGGSLRLSCAASGFTFSTYAMSWVRQAPGKCLEWVSAISGSGGRTFYAESVEGRFTISRDNSKNTLYLQMNSLRAEDTAVYYCAKHDYSNYPYFDYWGQGTLVTVSS

SEQ ID NO: 703 - protein, 108 aa, Artificial Sequence
  Synthetic peptide
EIVLTQSPGTLSLSPGERATLSCRASQSVRSTYLAWYQQKPGQAPRLLIYGASSRATGIPDRFSGSGSGTDFTLTISRLEPEDFAVYSCQQYGDLPFTFGCGTKLEIK

SEQ ID NO: 704 - protein, 243 aa, Artificial Sequence
  Synthetic peptide
EVQLLESGGGMVQPGGSLRLSCAASGFTFSTYAMSWVRQAPGKCLEWVSAISGSGGRTFYAESVEGRFTISRDNSKNTLYLQMNSLRAEDTAVYYCAKHDYSNYPYFDYWGQGTLVTVSSGGGGSGGGGSGGGGSEIVLTQSPGTLSLSPGERATLSCRASQSVRSTYLAWYQQKPGQAPRLLIYGASSRATGIPDRFSGSGSGTDFTLTISRLEPEDFAVYSCQQYGDLPFTFGCGTKLEIK

SEQ ID NO: 705 - protein, 498 aa, Artificial Sequence
  Synthetic peptide
EVQLLESGGGMVQPGGSLRLSCAASGFTFSTYAMSWVRQAPGKCLEWVSAISGSGGRTFYAESVEGRFTISRDNSKNTLYLQMNSLRAEDTAVYYCAKHDYSNYPYFDYWGQGTLVTVSSGGGGSGGGGSGGGGSEIVLTQSPGTLSLSPGERATLSCRASQSVRSTYLAWYQQKPGQAPRLLIYGASSRATGIPDRFSGSGSGTDFTLTISRLEPEDFAVYSCQQYGDLPFTFGCGTKLEIKSGGGGSEVQLVESGGGLVQPGGSLKLSCAASGFTFNKYAMNWVRQAPGKGLEWVARIRSKYNNYATYYADSVKDRFTISRDDSKNTAYLQMNNLKTEDTAVYYCVRHGNFGNSYISYWAYWGQGTLVTVSSGGGGSGGGGSGGGGSQTVVTQEPSLTVSPGGTVTLTCGSSTGAVTSGNYPNWVQQKPGQAPRGLIGGTKFLAPGTPARFSGSLLGGKAALTLSGVQPEDEAEYYCVLWYSNRWVFGGGTKLTVL

SEQ ID NO: 706 - protein, 986 aa, Artificial Sequence
  Synthetic peptide
EVQLLESGGGMVQPGGSLRLSCAASGFTFSTYAMSWVRQAPGKCLEWVSAISGSGGRTFYAESVEGRFTISRDNSKNTLYLQMNSLRAEDTAVYYCAKHDYSNYPYFDYWGQGTLVTVSSGGGGSGGGGSGGGGSEIVLTQSPGTLSLSPGERATLSCRASQSVRSTYLAWYQQKPGQAPRLLIYGASSRATGIPDRFSGSGSGTDFTLTISRLEPEDFAVYSCQQYGDLPFTFGCGTKLEIKSGGGGSEVQLVESGGGLVQPGGSLKLSCAASGFTFNKYAMNWVRQAPGKGLEWVARIRSKYNNYATYYADSVKDRFTISRDDSKNTAYLQMNNLKTEDTAVYYCVRHGNFGNSYISYWAYWGQGTLVTVSSGGGGSGGGGSGGGGSQTVVTQEPSLTVSPGGTVTLTCGSSTGAVTSGNYPNWVQQKPGQAPRGLIGGTKFLAPGTPARFSGSLLGGKAALTLSGVQPEDEAEYYCVLWYSNRWVFGGGTKLTVLGGGGDKTHTCPPCPAPELLGGPSVFLFPPKPKDTLMISRTPEVTCVVVDVSHEDPEVKFNWYVDGVEVHNAKTKPCEEQYGSTYRCVSVLTVLHQDWLNGKEYKCKVSNKALPAPIEKTISKAKGQPREPQVYTLPPSREEMTKNQVSLTCLVKGFYPSDIAVEWESNGQPENNYKTTPPVLDSDGSFFLYSKLTVDKSRWQQGNVFSCSVMHEALHNHYTQKSLSLSPGKGGGGSGGGGSGGGGSGGGGSGGGGSGGGGSDKTHTCPPCPAPELLGGPSVFLFPPKPKDTLMISRTPEVTCVVVDVSHEDPEVKFNWYVDGVEVHNAKTKPCEEQYGSTYRCVSVLTVLHQDWLNGKEYKCKVSNKALPAPIEKTISKAKGQPREPQVYTLPPSREEMTKNQVSLTCLVKGFYPSDIAVEWESNGQPENNYKTTPPVLDSDGSFFLYSKLTVDKSRWQQGNVFSCSVMHEALHNHYTQKSLSLSPGK

SEQ ID NO: 707 - protein, 120 aa, Artificial Sequence
  Synthetic peptide
EVQLLESGGGMVQPGGSLRLSCAASGFTFSTYAMSWVRQAPGKGLEWVSAISGSGGRTFYAESVEGRFTISRDNSKNTLYLQMNSLRAEDTAVYYCAKHDYSNYPYFDYWGQGTLVTVSS

SEQ ID NO: 708 - protein, 108 aa, Artificial Sequence
  Synthetic peptide
EIVLTQSPGTLSLSPGERATLSCRASQSVRSTYLAWYQQKPGQAPRLLIYGASSRATGIPDRFSGSGSGTDFTLTISRLEPEDFAVYSCQQYGDLPFTFGPGTKLEIK

SEQ ID NO: 709 - protein, 243 aa, Artificial Sequence
  Synthetic peptide
EVQLLESGGGMVQPGGSLRLSCAASGFTFSTYAMSWVRQAPGKGLEWVSAISGSGGRTFYAESVEGRFTISRDNSKNTLYLQMNSLRAEDTAVYYCAKHDYSNYPYFDYWGQGTLVTVSSGGGGSGGGGSGGGGSEIVLTQSPGTLSLSPGERATLSCRASQSVRSTYLAWYQQKPGQAPRLLIYGASSRATGIPDRFSGSGSGTDFTLTISRLEPEDFAVYSCQQYGDLPFTFGPGTKLEIK

SEQ ID NO: 710 - protein, 498 aa, Artificial Sequence
  Synthetic peptide
EVQLLESGGGMVQPGGSLRLSCAASGFTFSTYAMSWVRQAPGKGLEWVSAISGSGGRTFYAESVEGRFTISRDNSKNTLYLQMNSLRAEDTAVYYCAKHDYSNYPYFDYWGQGTLVTVSSGGGGSGGGGSGGGGSEIVLTQSPGTLSLSPGERATLSCRASQSVRSTYLAWYQQKPGQAPRLLIYGASSRATGIPDRFSGSGSGTDFTLTISRLEPEDFAVYSCQQYGDLPFTFGPGTKLEIKSGGGGSEVQLVESGGGLVQPGGSLKLSCAASGFTFNKYAMNWVRQAPGKGLEWVARIRSKYNNYATYYADSVKDRFTISRDDSKNTAYLQMNNLKTEDTAVYYCVRHGNFGNSYISYWAYWGQGTLVTVSSGGGGSGGGGSGGGGSQTVVTQEPSLTVSPGGTVTLTCGSSTGAVTSGNYPNWVQQKPGQAPRGLIGGTKFLAPGTPARFSGSLLGGKAALTLSGVQPEDEAEYYCVLWYSNRWVFGGGTKLTVL

SEQ ID NO: 711 - protein, 986 aa, Artificial Sequence
  Synthetic peptide
EVQLLESGGGMVQPGGSLRLSCAASGFTFSTYAMSWVRQAPGKGLEWVSAISGSGGRTFYAESVEGRFTISRDNSKNTLYLQMNSLRAEDTAVYYCAKHDYSNYPYFDYWGQGTLVTVSSGGGGSGGGGSGGGGSEIVLTQSPGTLSLSPGERATLSCRASQSVRSTYLAWYQQKPGQAPRLLIYGASSRATGIPDRFSGSGSGTDFTLTISRLEPEDFAVYSCQQYGDLPFTFGPGTKLEIKSGGGGSEVQLVESGGGLVQPGGSLKLSCAASGFTFNKYAMNWVRQAPGKGLEWVARIRSKYNNYATYYADSVKDRFTISRDDSKNTAYLQMNNLKTEDTAVYYCVRHGNFGNSYISYWAYWGQGTLVTVSSGGGGSGGGGSGGGGSQTVVTQEPSLTVSPGGTVTLTCGSSTGAVTSGNYPNWVQQKPGQAPRGLIGGTKFLAPGTPARFSGSLLGGKAALTLSGVQPEDEAEYYCVLWYSNRWVFGGGTKLTVLGGGGDKTHTCPPCPAPELLGGPSVFLFPPKPKDTLMISRTPEVTCVVVDVSHEDPEVKFNWYVDGVEVHNAKTKPCEEQYGSTYRCVSVLTVLHQDWLNGKEYKCKVSNKALPAPIEKTISKAKGQPREPQVYTLPPSREEMTKNQVSLTCLVKGFYPSDIAVEWESNGQPENNYKTTPPVLDSDGSFFLYSKLTVDKSRWQQGNVFSCSVMHEALHNHYTQKSLSLSPGKGGGGSGGGGSGGGGSGGGGSGGGGSGGGGSDKTHTCPPCPAPELLGGPSVFLFPPKPKDTLMISRTPEVTCVVVDVSHEDPEVKFNWYVDGVEVHNAKTKPCEEQYGSTYRCVSVLTVLHQDWLNGKEYKCKVSNKALPAPIEKTISKAKGQPREPQVYTLPPSREEMTKNQVSLTCLVKGFYPSDIAVEWESNGQPENNYKTTPPVLDSDGSFFLYSKLTVDKSRWQQGNVFSCSVMHEALHNHYTQKSLSLSPGK

SEQ ID NO: 712 - protein, 5 aa, Artificial Sequence
  Synthetic peptide
SYAMS

SEQ ID NO: 713 - protein, 17 aa, Artificial Sequence
  Synthetic peptide
AISGSGGYTYYAESVKG

SEQ ID NO: 714 - protein, 11 aa, Artificial Sequence
  Synthetic peptide
HDYSNYPYFDY

SEQ ID NO: 715 - protein, 12 aa, Artificial Sequence
  Synthetic peptide
RASQSVRSNYLA

SEQ ID NO: 716 - protein, 7 aa, Artificial Sequence
  Synthetic peptide
GASSRAT

SEQ ID NO: 717 - protein, 9 aa, Artificial Sequence
  Synthetic peptide
QQYGDLPFT

SEQ ID NO: 718 - protein, 120 aa, Artificial Sequence
  Synthetic peptide
EVQLLESGGGLVQPGGSLRLSCAASGFTFSSYAMSWVRQAPGKCLEWVSAISGSGGYTYYAESVKGRFTISRDNSKNTLYLQMNSLRAEDTAVYYCAKHDYSNYPYFDYWGQGTLVTVSS

SEQ ID NO: 719 - protein, 108 aa, Artificial Sequence
  Synthetic peptide
EIVLTQSPGTLSLSPGERATLSCRASQSVRSNYLAWYQQKPGQAPRLLIYGASSRATGIPDRFSGSGSGTDFTLTISRLEPEDFAVYYCQQYGDLPFTFGCGTKVEIK

SEQ ID NO: 720 - protein, 243 aa, Artificial Sequence
  Synthetic peptide
EVQLLESGGGLVQPGGSLRLSCAASGFTFSSYAMSWVRQAPGKCLEWVSAISGSGGYTYYAESVKGRFTISRDNSKNTLYLQMNSLRAEDTAVYYCAKHDYSNYPYFDYWGQGTLVTVSSGGGGSGGGGSGGGGSEIVLTQSPGTLSLSPGERATLSCRASQSVRSNYLAWYQQKPGQAPRLLIYGASSRATGIPDRFSGSGSGTDFTLTISRLEPEDFAVYYCQQYGDLPFTFGCGTKVEIK

SEQ ID NO: 721 - protein, 498 aa, Artificial Sequence
  Synthetic peptide
EVQLLESGGGLVQPGGSLRLSCAASGFTFSSYAMSWVRQAPGKCLEWVSAISGSGGYTYYAESVKGRFTISRDNSKNTLYLQMNSLRAEDTAVYYCAKHDYSNYPYFDYWGQGTLVTVSSGGGGSGGGGSGGGGSEIVLTQSPGTLSLSPGERATLSCRASQSVRSNYLAWYQQKPGQAPRLLIYGASSRATGIPDRFSGSGSGTDFTLTISRLEPEDFAVYYCQQYGDLPFTFGCGTKVEIKSGGGGSEVQLVESGGGLVQPGGSLKLSCAASGFTFNKYAMNWVRQAPGKGLEWVARIRSKYNNYATYYADSVKDRFTISRDDSKNTAYLQMNNLKTEDTAVYYCVRHGNFGNSYISYWAYWGQGTLVTVSSGGGGSGGGGSGGGGSQTVVTQEPSLTVSPGGTVTLTCGSSTGAVTSGNYPNWVQQKPGQAPRGLIGGTKFLAPGTPARFSGSLLGGKAALTLSGVQPEDEAEYYCVLWYSNRWVFGGGTKLTVL

SEQ ID NO: 722 - protein, 986 aa, Artificial Sequence
  Synthetic peptide
EVQLLESGGGLVQPGGSLRLSCAASGFTFSSYAMSWVRQAPGKCLEWVSAISGSGGYTYYAESVKGRFTISRDNSKNTLYLQMNSLRAEDTAVYYCAKHDYSNYPYFDYWGQGTLVTVSSGGGGSGGGGSGGGGSEIVLTQSPGTLSLSPGERATLSCRASQSVRSNYLAWYQQKPGQAPRLLIYGASSRATGIPDRFSGSGSGTDFTLTISRLEPEDFAVYYCQQYGDLPFTFGCGTKVEIKSGGGGSEVQLVESGGGLVQPGGSLKLSCAASGFTFNKYAMNWVRQAPGKGLEWVARIRSKYNNYATYYADSVKDRFTISRDDSKNTAYLQMNNLKTEDTAVYYCVRHGNFGNSYISYWAYWGQGTLVTVSSGGGGSGGGGSGGGGSQTVVTQEPSLTVSPGGTVTLTCGSSTGAVTSGNYPNWVQQKPGQAPRGLIGGTKFLAPGTPARFSGSLLGGKAALTLSGVQPEDEAEYYCVLWYSNRWVFGGGTKLTVLGGGGDKTHTCPPCPAPELLGGPSVFLFPPKPKDTLMISRTPEVTCVVVDVSHEDPEVKFNWYVDGVEVHNAKTKPCEEQYGSTYRCVSVLTVLHQDWLNGKEYKCKVSNKALPAPIEKTISKAKGQPREPQVYTLPPSREEMTKNQVSLTCLVKGFYPSDIAVEWESNGQPENNYKTTPPVLDSDGSFFLYSKLTVDKSRWQQGNVFSCSVMHEALHNHYTQKSLSLSPGKGGGGSGGGGSGGGGSGGGGSGGGGSGGGGSDKTHTCPPCPAPELLGGPSVFLFPPKPKDTLMISRTPEVTCVVVDVSHEDPEVKFNWYVDGVEVHNAKTKPCEEQYGSTYRCVSVLTVLHQDWLNGKEYKCKVSNKALPAPIEKTISKAKGQPREPQVYTLPPSREEMTKNQVSLTCLVKGFYPSDIAVEWESNGQPENNYKTTPPVLDSDGSFFLYSKLTVDKSRWQQGNVFSCSVMHEALHNHYTQKSLSLSPGK

SEQ ID NO: 723 - protein, 120 aa, Artificial Sequence
  Synthetic peptide
EVQLLESGGGLVQPGGSLRLSCAASGFTFSSYAMSWVRQAPGKGLEWVSAISGSGGYTYYAESVKGRFTISRDNSKNTLYLQMNSLRAEDTAVYYCAKHDYSNYPYFDYWGQGTLVTVSS

SEQ ID NO: 724 - protein, 108 aa, Artificial Sequence
  Synthetic peptide
EIVLTQSPGTLSLSPGERATLSCRASQSVRSNYLAWYQQKPGQAPRLLIYGASSRATGIPDRFSGSGSGTDFTLTISRLEPEDFAVYYCQQYGDLPFTFGPGTKVEIK

SEQ ID NO: 725 - protein, 243 aa, Artificial Sequence
  Synthetic peptide
EVQLLESGGGLVQPGGSLRLSCAASGFTFSSYAMSWVRQAPGKGLEWVSAISGSGGYTYYAESVKGRFTISRDNSKNTLYLQMNSLRAEDTAVYYCAKHDYSNYPYFDYWGQGTLVTVSSGGGGSGGGGSGGGGSEIVLTQSPGTLSLSPGERATLSCRASQSVRSNYLAWYQQKPGQAPRLLIYGASSRATGIPDRFSGSGSGTDFTLTISRLEPEDFAVYYCQQYGDLPFTFGPGTKVEIK

SEQ ID NO: 726 - protein, 498 aa, Artificial Sequence
  Synthetic peptide
EVQLLESGGGLVQPGGSLRLSCAASGFTFSSYAMSWVRQAPGKGLEWVSAISGSGGYTYYAESVKGRFTISRDNSKNTLYLQMNSLRAEDTAVYYCAKHDYSNYPYFDYWGQGTLVTVSSGGGGSGGGGSGGGGSEIVLTQSPGTLSLSPGERATLSCRASQSVRSNYLAWYQQKPGQAPRLLIYGASSRATGIPDRFSGSGSGTDFTLTISRLEPEDFAVYYCQQYGDLPFTFGPGTKVEIKSGGGGSEVQLVESGGGLVQPGGSLKLSCAASGFTFNKYAMNWVRQAPGKGLEWVARIRSKYNNYATYYADSVKDRFTISRDDSKNTAYLQMNNLKTEDTAVYYCVRHGNFGNSYISYWAYWGQGTLVTVSSGGGGSGGGGSGGGGSQTVVTQEPSLTVSPGGTVTLTCGSSTGAVTSGNYPNWVQQKPGQAPRGLIGGTKFLAPGTPARFSGSLLGGKAALTLSGVQPEDEAEYYCVLWYSNRWVFGGGTKLTVL

SEQ ID NO: 727 - protein, 986 aa, Artificial Sequence
  Synthetic peptide
EVQLLESGGGLVQPGGSLRLSCAASGFTFSSYAMSWVRQAPGKGLEWVSAISGSGGYTYYAESVKGRFTISRDNSKNTLYLQMNSLRAEDTAVYYCAKHDYSNYPYFDYWGQGTLVTVSSGGGGSGGGGSGGGGSEIVLTQSPGTLSLSPGERATLSCRASQSVRSNYLAWYQQKPGQAPRLLIYGASSRATGIPDRFSGSGSGTDFTLTISRLEPEDFAVYYCQQYGDLPFTFGPGTKVEIKSGGGGSEVQLVESGGGLVQPGGSLKLSCAASGFTFNKYAMNWVRQAPGKGLEWVARIRSKYNNYATYYADSVKDRFTISRDDSKNTAYLQMNNLKTEDTAVYYCVRHGNFGNSYISYWAYWGQGTLVTVSSGGGGSGGGGSGGGGSQTVVTQEPSLTVSPGGTVTLTCGSSTGAVTSGNYPNWVQQKPGQAPRGLIGGTKFLAPGTPARFSGSLLGGKAALTLSGVQPEDEAEYYCVLWYSNRWVFGGGTKLTVLGGGGDKTHTCPPCPAPELLGGPSVFLFPPKPKDTLMISRTPEVTCVVVDVSHEDPEVKFNWYVDGVEVHNAKTKPCEEQYGSTYRCVSVLTVLHQDWLNGKEYKCKVSNKALPAPIEKTISKAKGQPREPQVYTLPPSREEMTKNQVSLTCLVKGFYPSDIAVEWESNGQPENNYKTTPPVLDSDGSFFLYSKLTVDKSRWQQGNVFSCSVMHEALHNHYTQKSLSLSPGKGGGGSGGGGSGGGGSGGGGSGGGGSGGGGSDKTHTCPPCPAPELLGGPSVFLFPPKPKDTLMISRTPEVTCVVVDVSHEDPEVKFNWYVDGVEVHNAKTKPCEEQYGSTYRCVSVLTVLHQDWLNGKEYKCKVSNKALPAPIEKTISKAKGQPREPQVYTLPPSREEMTKNQVSLTCLVKGFYPSDIAVEWESNGQPENNYKTTPPVLDSDGSFFLYSKLTVDKSRWQQGNVFSCSVMHEALHNHYTQKSLSLSPGK

SEQ ID NO: 728 - protein, 5 aa, Artificial Sequence
  Synthetic peptide
SYAMS

SEQ ID NO: 729 - protein, 17 aa, Artificial Sequence
  Synthetic peptide
AISGSGGSTFYAESVKG

SEQ ID NO: 730 - protein, 11 aa, Artificial Sequence
  Synthetic peptide
HDYSNYPYFDY

SEQ ID NO: 731 - protein, 12 aa, Artificial Sequence
  Synthetic peptide
RASQSVRSSYLA

SEQ ID NO: 732 - protein, 7 aa, Artificial Sequence
  Synthetic peptide
GASSRAT

SEQ ID NO: 733 - protein, 9 aa, Artificial Sequence
  Synthetic peptide
QQYGDLPFT

SEQ ID NO: 734 - protein, 120 aa, Artificial Sequence
  Synthetic peptide
EVQLLESGGGLAQPGGSLRLSCAASGFTFSSYAMSWVRQAPGKCLEWVSAISGSGGSTFYAESVKGRFTISRDNSKNTLYLQMNSLRAEDTAVYFCAKHDYSNYPYFDYWGQGTLVTVSS

SEQ ID NO: 735 - protein, 108 aa, Artificial Sequence
  Synthetic peptide
EIVLTQSPGTLSLSPGERATLSCRASQSVRSSYLAWYQQKPGQAPRLLIYGASSRATGIPDRFSGSGSGTDFTLTISRLEPEDFAVYYCQQYGDLPFTFGCGTKVEIK

SEQ ID NO: 736 - protein, 243 aa, Artificial Sequence
  Synthetic peptide
EVQLLESGGGLAQPGGSLRLSCAASGFTFSSYAMSWVRQAPGKCLEWVSAISGSGGSTFYAESVKGRFTISRDNSKNTLYLQMNSLRAEDTAVYFCAKHDYSNYPYFDYWGQGTLVTVSSGGGGSGGGGSGGGGSEIVLTQSPGTLSLSPGERATLSCRASQSVRSSYLAWYQQKPGQAPRLLIYGASSRATGIPDRFSGSGSGTDFTLTISRLEPEDFAVYYCQQYGDLPFTFGCGTKVEIK

SEQ ID NO: 737 - protein, 498 aa, Artificial Sequence
  Synthetic peptide
EVQLLESGGGLAQPGGSLRLSCAASGFTFSSYAMSWVRQAPGKCLEWVSAISGSGGSTFYAESVKGRFTISRDNSKNTLYLQMNSLRAEDTAVYFCAKHDYSNYPYFDYWGQGTLVTVSSGGGGSGGGGSGGGGSEIVLTQSPGTLSLSPGERATLSCRASQSVRSSYLAWYQQKPGQAPRLLIYGASSRATGIPDRFSGSGSGTDFTLTISRLEPEDFAVYYCQQYGDLPFTFGCGTKVEIKSGGGGSEVQLVESGGGLVQPGGSLKLSCAASGFTFNKYAMNWVRQAPGKGLEWVARIRSKYNNYATYYADSVKDRFTISRDDSKNTAYLQMNNLKTEDTAVYYCVRHGNFGNSYISYWAYWGQGTLVTVSSGGGGSGGGGSGGGGSQTVVTQEPSLTVSPGGTVTLTCGSSTGAVTSGNYPNWVQQKPGQAPRGLIGGTKFLAPGTPARFSGSLLGGKAALTLSGVQPEDEAEYYCVLWYSNRWVFGGGTKLTVL

SEQ ID NO: 738 - protein, 986 aa, Artificial Sequence
  Synthetic peptide
EVQLLESGGGLAQPGGSLRLSCAASGFTFSSYAMSWVRQAPGKCLEWVSAISGSGGSTFYAESVKGRFTISRDNSKNTLYLQMNSLRAEDTAVYFCAKHDYSNYPYFDYWGQGTLVTVSSGGGGSGGGGSGGGGSEIVLTQSPGTLSLSPGERATLSCRASQSVRSSYLAWYQQKPGQAPRLLIYGASSRATGIPDRFSGSGSGTDFTLTISRLEPEDFAVYYCQQYGDLPFTFGCGTKVEIKSGGGGSEVQLVESGGGLVQPGGSLKLSCAASGFTFNKYAMNWVRQAPGKGLEWVARIRSKYNNYATYYADSVKDRFTISRDDSKNTAYLQMNNLKTEDTAVYYCVRHGNFGNSYISYWAYWGQGTLVTVSSGGGGSGGGGSGGGGSQTVVTQEPSLTVSPGGTVTLTCGSSTGAVTSGNYPNWVQQKPGQAPRGLIGGTKFLAPGTPARFSGSLLGGKAALTLSGVQPEDEAEYYCVLWYSNRWVFGGGTKLTVLGGGGDKTHTCPPCPAPELLGGPSVFLFPPKPKDTLMISRTPEVTCVVVDVSHEDPEVKFNWYVDGVEVHNAKTKPCEEQYGSTYRCVSVLTVLHQDWLNGKEYKCKVSNKALPAPIEKTISKAKGQPREPQVYTLPPSREEMTKNQVSLTCLVKGFYPSDIAVEWESNGQPENNYKTTPPVLDSDGSFFLYSKLTVDKSRWQQGNVFSCSVMHEALHNHYTQKSLSLSPGKGGGGSGGGGSGGGGSGGGGSGGGGSGGGGSDKTHTCPPCPAPELLGGPSVFLFPPKPKDTLMISRTPEVTCVVVDVSHEDPEVKFNWYVDGVEVHNAKTKPCEEQYGSTYRCVSVLTVLHQDWLNGKEYKCKVSNKALPAPIEKTISKAKGQPREPQVYTLPPSREEMTKNQVSLTCLVKGFYPSDIAVEWESNGQPENNYKTTPPVLDSDGSFFLYSKLTVDKSRWQQGNVFSCSVMHEALHNHYTQKSLSLSPGK

SEQ ID NO: 739 - protein, 120 aa, Artificial Sequence
  Synthetic peptide
EVQLLESGGGLAQPGGSLRLSCAASGFTFSSYAMSWVRQAPGKGLEWVSAISGSGGSTFYAESVKGRFTISRDNSKNTLYLQMNSLRAEDTAVYFCAKHDYSNYPYFDYWGQGTLVTVSS

SEQ ID NO: 740 - protein, 108 aa, Artificial Sequence
  Synthetic peptide
EIVLTQSPGTLSLSPGERATLSCRASQSVRSSYLAWYQQKPGQAPRLLIYGASSRATGIPDRFSGSGSGTDFTLTISRLEPEDFAVYYCQQYGDLPFTFGPGTKVEIK

SEQ ID NO: 741 - protein, 243 aa, Artificial Sequence
  Synthetic peptide
EVQLLESGGGLAQPGGSLRLSCAASGFTFSSYAMSWVRQAPGKGLEWVSAISGSGGSTFYAESVKGRFTISRDNSKNTLYLQMNSLRAEDTAVYFCAKHDYSNYPYFDYWGQGTLVTVSSGGGGSGGGGSGGGGSEIVLTQSPGTLSLSPGERATLSCRASQSVRSSYLAWYQQKPGQAPRLLIYGASSRATGIPDRFSGSGSGTDFTLTISRLEPEDFAVYYCQQYGDLPFTFGPGTKVEIK

SEQ ID NO: 742 - protein, 498 aa, Artificial Sequence
  Synthetic peptide
EVQLLESGGGLAQPGGSLRLSCAASGFTFSSYAMSWVRQAPGKGLEWVSAISGSGGSTFYAESVKGRFTISRDNSKNTLYLQMNSLRAEDTAVYFCAKHDYSNYPYFDYWGQGTLVTVSSGGGGSGGGGSGGGGSEIVLTQSPGTLSLSPGERATLSCRASQSVRSSYLAWYQQKPGQAPRLLIYGASSRATGIPDRFSGSGSGTDFTLTISRLEPEDFAVYYCQQYGDLPFTFGPGTKVEIKSGGGGSEVQLVESGGGLVQPGGSLKLSCAASGFTFNKYAMNWVRQAPGKGLEWVARIRSKYNNYATYYADSVKDRFTISRDDSKNTAYLQMNNLKTEDTAVYYCVRHGNFGNSYISYWAYWGQGTLVTVSSGGGGSGGGGSGGGGSQTVVTQEPSLTVSPGGTVTLTCGSSTGAVTSGNYPNWVQQKPGQAPRGLIGGTKFLAPGTPARFSGSLLGGKAALTLSGVQPEDEAEYYCVLWYSNRWVFGGGTKLTVL

SEQ ID NO: 743 - protein, 986 aa, Artificial Sequence
  Synthetic peptide
EVQLLESGGGLAQPGGSLRLSCAASGFTFSSYAMSWVRQAPGKGLEWVSAISGSGGSTFYAESVKGRFTISRDNSKNTLYLQMNSLRAEDTAVYFCAKHDYSNYPYFDYWGQGTLVTVSSGGGGSGGGGSGGGGSEIVLTQSPGTLSLSPGERATLSCRASQSVRSSYLAWYQQKPGQAPRLLIYGASSRATGIPDRFSGSGSGTDFTLTISRLEPEDFAVYYCQQYGDLPFTFGPGTKVEIKSGGGGSEVQLVESGGGLVQPGGSLKLSCAASGFTFNKYAMNWVRQAPGKGLEWVARIRSKYNNYATYYADSVKDRFTISRDDSKNTAYLQMNNLKTEDTAVYYCVRHGNFGNSYISYWAYWGQGTLVTVSSGGGGSGGGGSGGGGSQTVVTQEPSLTVSPGGTVTLTCGSSTGAVTSGNYPNWVQQKPGQAPRGLIGGTKFLAPGTPARFSGSLLGGKAALTLSGVQPEDEAEYYCVLWYSNRWVFGGGTKLTVLGGGGDKTHTCPPCPAPELLGGPSVFLFPPKPKDTLMISRTPEVTCVVVDVSHEDPEVKFNWYVDGVEVHNAKTKPCEEQYGSTYRCVSVLTVLHQDWLNGKEYKCKVSNKALPAPIEKTISKAKGQPREPQVYTLPPSREEMTKNQVSLTCLVKGFYPSDIAVEWESNGQPENNYKTTPPVLDSDGSFFLYSKLTVDKSRWQQGNVFSCSVMHEALHNHYTQKSLSLSPGKGGGGSGGGGSGGGGSGGGGSGGGGSGGGGSDKTHTCPPCPAPELLGGPSVFLFPPKPKDTLMISRTPEVTCVVVDVSHEDPEVKFNWYVDGVEVHNAKTKPCEEQYGSTYRCVSVLTVLHQDWLNGKEYKCKVSNKALPAPIEKTISKAKGQPREPQVYTLPPSREEMTKNQVSLTCLVKGFYPSDIAVEWESNGQPENNYKTTPPVLDSDGSFFLYSKLTVDKSRWQQGNVFSCSVMHEALHNHYTQKSLSLSPGK

SEQ ID NO: 744 - protein, 5 aa, Artificial Sequence
  Synthetic peptide
SYAMS

SEQ ID NO: 745 - protein, 17 aa, Artificial Sequence
  Synthetic peptide
AISGSGGRTFYAESVEG

SEQ ID NO: 746 - protein, 11 aa, Artificial Sequence
  Synthetic peptide
HDYSNYPYFDY

SEQ ID NO: 747 - protein, 12 aa, Artificial Sequence
  Synthetic peptide
RASQSVRSNYLA

SEQ ID NO: 748 - protein, 7 aa, Artificial Sequence
  Synthetic peptide
GASSRAT

SEQ ID NO: 749 - protein, 9 aa, Artificial Sequence
  Synthetic peptide
QQYGDLPFT

SEQ ID NO: 750 - protein, 120 aa, Artificial Sequence; identical to SEQ ID NO: 638
  Synthetic peptide

SEQ ID NO: 751 - protein, 108 aa, Artificial Sequence; identical to SEQ ID NO: 719
  Synthetic peptide

SEQ ID NO: 752 - protein, 243 aa, Artificial Sequence
  Synthetic peptide
EVQLLESGGGMVQPGGSLRLSCAASGFTFSSYAMSWVRQAPGKCLEWVSAISGSGGRTFYAESVEGRFTISRDNSKNTLYLQMNSLRAEDTAVYYCAKHDYSNYPYFDYWGQGTLVTVSSGGGGSGGGGSGGGGSEIVLTQSPGTLSLSPGERATLSCRASQSVRSNYLAWYQQKPGQAPRLLIYGASSRATGIPDRFSGSGSGTDFTLTISRLEPEDFAVYYCQQYGDLPFTFGCGTKVEIK

SEQ ID NO: 753 - protein, 498 aa, Artificial Sequence
  Synthetic peptide
EVQLLESGGGMVQPGGSLRLSCAASGFTFSSYAMSWVRQAPGKCLEWVSAISGSGGRTFYAESVEGRFTISRDNSKNTLYLQMNSLRAEDTAVYYCAKHDYSNYPYFDYWGQGTLVTVSSGGGGSGGGGSGGGGSEIVLTQSPGTLSLSPGERATLSCRASQSVRSNYLAWYQQKPGQAPRLLIYGASSRATGIPDRFSGSGSGTDFTLTISRLEPEDFAVYYCQQYGDLPFTFGCGTKVEIKSGGGGSEVQLVESGGGLVQPGGSLKLSCAASGFTFNKYAMNWVRQAPGKGLEWVARIRSKYNNYATYYADSVKDRFTISRDDSKNTAYLQMNNLKTEDTAVYYCVRHGNFGNSYISYWAYWGQGTLVTVSSGGGGSGGGGSGGGGSQTVVTQEPSLTVSPGGTVTLTCGSSTGAVTSGNYPNWVQQKPGQAPRGLIGGTKFLAPGTPARFSGSLLGGKAALTLSGVQPEDEAEYYCVLWYSNRWVFGGGTKLTVL

SEQ ID NO: 754 - protein, 986 aa, Artificial Sequence
  Synthetic peptide
EVQLLESGGGMVQPGGSLRLSCAASGFTFSSYAMSWVRQAPGKCLEWVSAISGSGGRTFYAESVEGRFTISRDNSKNTLYLQMNSLRAEDTAVYYCAKHDYSNYPYFDYWGQGTLVTVSSGGGGSGGGGSGGGGSEIVLTQSPGTLSLSPGERATLSCRASQSVRSNYLAWYQQKPGQAPRLLIYGASSRATGIPDRFSGSGSGTDFTLTISRLEPEDFAVYYCQQYGDLPFTFGCGTKVEIKSGGGGSEVQLVESGGGLVQPGGSLKLSCAASGFTFNKYAMNWVRQAPGKGLEWVARIRSKYNNYATYYADSVKDRFTISRDDSKNTAYLQMNNLKTEDTAVYYCVRHGNFGNSYISYWAYWGQGTLVTVSSGGGGSGGGGSGGGGSQTVVTQEPSLTVSPGGTVTLTCGSSTGAVTSGNYPNWVQQKPGQAPRGLIGGTKFLAPGTPARFSGSLLGGKAALTLSGVQPEDEAEYYCVLWYSNRWVFGGGTKLTVLGGGGDKTHTCPPCPAPELLGGPSVFLFPPKPKDTLMISRTPEVTCVVVDVSHEDPEVKFNWYVDGVEVHNAKTKPCEEQYGSTYRCVSVLTVLHQDWLNGKEYKCKVSNKALPAPIEKTISKAKGQPREPQVYTLPPSREEMTKNQVSLTCLVKGFYPSDIAVEWESNGQPENNYKTTPPVLDSDGSFFLYSKLTVDKSRWQQGNVFSCSVMHEALHNHYTQKSLSLSPGKGGGGSGGGGSGGGGSGGGGSGGGGSGGGGSDKTHTCPPCPAPELLGGPSVFLFPPKPKDTLMISRTPEVTCVVVDVSHEDPEVKFNWYVDGVEVHNAKTKPCEEQYGSTYRCVSVLTVLHQDWLNGKEYKCKVSNKALPAPIEKTISKAKGQPREPQVYTLPPSREEMTKNQVSLTCLVKGFYPSDIAVEWESNGQPENNYKTTPPVLDSDGSFFLYSKLTVDKSRWQQGNVFSCSVMHEALHNHYTQKSLSLSPGK

SEQ ID NO: 755 - protein, 120 aa, Artificial Sequence; identical to SEQ ID NO: 643
  Synthetic peptide

SEQ ID NO: 756 - protein, 108 aa, Artificial Sequence; identical to SEQ ID NO: 724
  Synthetic peptide

SEQ ID NO: 757 - protein, 243 aa, Artificial Sequence
  Synthetic peptide
EVQLLESGGGMVQPGGSLRLSCAASGFTFSSYAMSWVRQAPGKGLEWVSAISGSGGRTFYAESVEGRFTISRDNSKNTLYLQMNSLRAEDTAVYYCAKHDYSNYPYFDYWGQGTLVTVSSGGGGSGGGGSGGGGSEIVLTQSPGTLSLSPGERATLSCRASQSVRSNYLAWYQQKPGQAPRLLIYGASSRATGIPDRFSGSGSGTDFTLTISRLEPEDFAVYYCQQYGDLPFTFGPGTKVEIK

SEQ ID NO: 758 - protein, 498 aa, Artificial Sequence
  Synthetic peptide
EVQLLESGGGMVQPGGSLRLSCAASGFTFSSYAMSWVRQAPGKGLEWVSAISGSGGRTFYAESVEGRFTISRDNSKNTLYLQMNSLRAEDTAVYYCAKHDYSNYPYFDYWGQGTLVTVSSGGGGSGGGGSGGGGSEIVLTQSPGTLSLSPGERATLSCRASQSVRSNYLAWYQQKPGQAPRLLIYGASSRATGIPDRFSGSGSGTDFTLTISRLEPEDFAVYYCQQYGDLPFTFGPGTKVEIKSGGGGSEVQLVESGGGLVQPGGSLKLSCAASGFTFNKYAMNWVRQAPGKGLEWVARIRSKYNNYATYYADSVKDRFTISRDDSKNTAYLQMNNLKTEDTAVYYCVRHGNFGNSYISYWAYWGQGTLVTVSSGGGGSGGGGSGGGGSQTVVTQEPSLTVSPGGTVTLTCGSSTGAVTSGNYPNWVQQKPGQAPRGLIGGTKFLAPGTPARFSGSLLGGKAALTLSGVQPEDEAEYYCVLWYSNRWVFGGGTKLTVL

SEQ ID NO: 759 - protein, 986 aa, Artificial Sequence
  Synthetic peptide
EVQLLESGGGMVQPGGSLRLSCAASGFTFSSYAMSWVRQAPGKGLEWVSAISGSGGRTFYAESVEGRFTISRDNSKNTLYLQMNSLRAEDTAVYYCAKHDYSNYPYFDYWGQGTLVTVSSGGGGSGGGGSGGGGSEIVLTQSPGTLSLSPGERATLSCRASQSVRSNYLAWYQQKPGQAPRLLIYGASSRATGIPDRFSGSGSGTDFTLTISRLEPEDFAVYYCQQYGDLPFTFGPGTKVEIKSGGGGSEVQLVESGGGLVQPGGSLKLSCAASGFTFNKYAMNWVRQAPGKGLEWVARIRSKYNNYATYYADSVKDRFTISRDDSKNTAYLQMNNLKTEDTAVYYCVRHGNFGNSYISYWAYWGQGTLVTVSSGGGGSGGGGSGGGGSQTVVTQEPSLTVSPGGTVTLTCGSSTGAVTSGNYPNWVQQKPGQAPRGLIGGTKFLAPGTPARFSGSLLGGKAALTLSGVQPEDEAEYYCVLWYSNRWVFGGGTKLTVLGGGGDKTHTCPPCPAPELLGGPSVFLFPPKPKDTLMISRTPEVTCVVVDVSHEDPEVKFNWYVDGVEVHNAKTKPCEEQYGSTYRCVSVLTVLHQDWLNGKEYKCKVSNKALPAPIEKTISKAKGQPREPQVYTLPPSREEMTKNQVSLTCLVKGFYPSDIAVEWESNGQPENNYKTTPPVLDSDGSFFLYSKLTVDKSRWQQGNVFSCSVMHEALHNHYTQKSLSLSPGKGGGGSGGGGSGGGGSGGGGSGGGGSGGGGSDKTHTCPPCPAPELLGGPSVFLFPPKPKDTLMISRTPEVTCVVVDVSHEDPEVKFNWYVDGVEVHNAKTKPCEEQYGSTYRCVSVLTVLHQDWLNGKEYKCKVSNKALPAPIEKTISKAKGQPREPQVYTLPPSREEMTKNQVSLTCLVKGFYPSDIAVEWESNGQPENNYKTTPPVLDSDGSFFLYSKLTVDKSRWQQGNVFSCSVMHEALHNHYTQKSLSLSPGK

SEQ ID NO: 760 - protein, 5 aa, Artificial Sequence
  Synthetic peptide
SYAMS

SEQ ID NO: 761 - protein, 17 aa, Artificial Sequence
  Synthetic peptide
AISGSGGRTFYAESVEG

SEQ ID NO: 762 - protein, 11 aa, Artificial Sequence
  Synthetic peptide
HDYSNYPYFDY

SEQ ID NO: 763 - protein, 12 aa, Artificial Sequence
  Synthetic peptide
RASQSVRSSYLA

SEQ ID NO: 764 - protein, 7 aa, Artificial Sequence
  Synthetic peptide
GASSRAT

SEQ ID NO: 765 - protein, 9 aa, Artificial Sequence
  Synthetic peptide
QQYGSSPFT

SEQ ID NO: 766 - protein, 120 aa, Artificial Sequence; identical to SEQ ID NO: 638
  Synthetic peptide

SEQ ID NO: 767 - protein, 108 aa, Artificial Sequence
  Synthetic peptide
EIVLTQSPGTLSLSPGERATLSCRASQSVRSSYLAWYQQKPGQAPRLLIYGASSRATGIPDRFSGSGSGTDFTLTISRLEPEDFAVYYCQQYGSSPFTFGCGTKVEIK

SEQ ID NO: 768 - protein, 243 aa, Artificial Sequence
  Synthetic peptide
EVQLLESGGGMVQPGGSLRLSCAASGFTFSSYAMSWVRQAPGKCLEWVSAISGSGGRTFYAESVEGRFTISRDNSKNTLYLQMNSLRAEDTAVYYCAKHDYSNYPYFDYWGQGTLVTVSSGGGGSGGGGSGGGGSEIVLTQSPGTLSLSPGERATLSCRASQSVRSSYLAWYQQKPGQAPRLLIYGASSRATGIPDRFSGSGSGTDFTLTISRLEPEDFAVYYCQQYGSSPFTFGCGTKVEIK

SEQ ID NO: 769 - protein, 498 aa, Artificial Sequence
  Synthetic peptide
EVQLLESGGGMVQPGGSLRLSCAASGFTFSSYAMSWVRQAPGKCLEWVSAISGSGGRTFYAESVEGRFTISRDNSKNTLYLQMNSLRAEDTAVYYCAKHDYSNYPYFDYWGQGTLVTVSSGGGGSGGGGSGGGGSEIVLTQSPGTLSLSPGERATLSCRASQSVRSSYLAWYQQKPGQAPRLLIYGASSRATGIPDRFSGSGSGTDFTLTISRLEPEDFAVYYCQQYGSSPFTFGCGTKVEIKSGGGGSEVQLVESGGGLVQPGGSLKLSCAASGFTFNKYAMNWVRQAPGKGLEWVARIRSKYNNYATYYADSVKDRFTISRDDSKNTAYLQMNNLKTEDTAVYYCVRHGNFGNSYISYWAYWGQGTLVTVSSGGGGSGGGGSGGGGSQTVVTQEPSLTVSPGGTVTLTCGSSTGAVTSGNYPNWVQQKPGQAPRGLIGGTKFLAPGTPARFSGSLLGGKAALTLSGVQPEDEAEYYCVLWYSNRWVFGGGTKLTVL

SEQ ID NO: 770 - protein, 986 aa, Artificial Sequence
  Synthetic peptide
EVQLLESGGGMVQPGGSLRLSCAASGFTFSSYAMSWVRQAPGKCLEWVSAISGSGGRTFYAESVEGRFTISRDNSKNTLYLQMNSLRAEDTAVYYCAKHDYSNYPYFDYWGQGTLVTVSSGGGGSGGGGSGGGGSEIVLTQSPGTLSLSPGERATLSCRASQSVRSSYLAWYQQKPGQAPRLLIYGASSRATGIPDRFSGSGSGTDFTLTISRLEPEDFAVYYCQQYGSSPFTFGCGTKVEIKSGGGGSEVQLVESGGGLVQPGGSLKLSCAASGFTFNKYAMNWVRQAPGKGLEWVARIRSKYNNYATYYADSVKDRFTISRDDSKNTAYLQMNNLKTEDTAVYYCVRHGNFGNSYISYWAYWGQGTLVTVSSGGGGSGGGGSGGGGSQTVVTQEPSLTVSPGGTVTLTCGSSTGAVTSGNYPNWVQQKPGQAPRGLIGGTKFLAPGTPARFSGSLLGGKAALTLSGVQPEDEAEYYCVLWYSNRWVFGGGTKLTVLGGGGDKTHTCPPCPAPELLGGPSVFLFPPKPKDTLMISRTPEVTCVVVDVSHEDPEVKFNWYVDGVEVHNAKTKPCEEQYGSTYRCVSVLTVLHQDWLNGKEYKCKVSNKALPAPIEKTISKAKGQPREPQVYTLPPSREEMTKNQVSLTCLVKGFYPSDIAVEWESNGQPENNYKTTPPVLDSDGSFFLYSKLTVDKSRWQQGNVFSCSVMHEALHNHYTQKSLSLSPGKGGGGSGGGGSGGGGSGGGGSGGGGSGGGGSDKTHTCPPCPAPELLGGPSVFLFPPKPKDTLMISRTPEVTCVVVDVSHEDPEVKFNWYVDGVEVHNAKTKPCEEQYGSTYRCVSVLTVLHQDWLNGKEYKCKVSNKALPAPIEKTISKAKGQPREPQVYTLPPSREEMTKNQVSLTCLVKGFYPSDIAVEWESNGQPENNYKTTPPVLDSDGSFFLYSKLTVDKSRWQQGNVFSCSVMHEALHNHYTQKSLSLSPGK

SEQ ID NO: 771 - protein, 120 aa, Artificial Sequence; identical to SEQ ID NO: 643
  Synthetic peptide

SEQ ID NO: 772 - protein, 108 aa, Artificial Sequence
  Synthetic peptide
EIVLTQSPGTLSLSPGERATLSCRASQSVRSSYLAWYQQKPGQAPRLLIYGASSRATGIPDRFSGSGSGTDFTLTISRLEPEDFAVYYCQQYGSSPFTFGPGTKVEIK

SEQ ID NO: 773 - protein, 243 aa, Artificial Sequence
  Synthetic peptide
EVQLLESGGGMVQPGGSLRLSCAASGFTFSSYAMSWVRQAPGKGLEWVSAISGSGGRTFYAESVEGRFTISRDNSKNTLYLQMNSLRAEDTAVYYCAKHDYSNYPYFDYWGQGTLVTVSSGGGGSGGGGSGGGGSEIVLTQSPGTLSLSPGERATLSCRASQSVRSSYLAWYQQKPGQAPRLLIYGASSRATGIPDRFSGSGSGTDFTLTISRLEPEDFAVYYCQQYGSSPFTFGPGTKVEIK

SEQ ID NO: 774 - protein, 498 aa, Artificial Sequence
  Synthetic peptide
EVQLLESGGGMVQPGGSLRLSCAASGFTFSSYAMSWVRQAPGKGLEWVSAISGSGGRTFYAESVEGRFTISRDNSKNTLYLQMNSLRAEDTAVYYCAKHDYSNYPYFDYWGQGTLVTVSSGGGGSGGGGSGGGGSEIVLTQSPGTLSLSPGERATLSCRASQSVRSSYLAWYQQKPGQAPRLLIYGASSRATGIPDRFSGSGSGTDFTLTISRLEPEDFAVYYCQQYGSSPFTFGPGTKVEIKSGGGGSEVQLVESGGGLVQPGGSLKLSCAASGFTFNKYAMNWVRQAPGKGLEWVARIRSKYNNYATYYADSVKDRFTISRDDSKNTAYLQMNNLKTEDTAVYYCVRHGNFGNSYISYWAYWGQGTLVTVSSGGGGSGGGGSGGGGSQTVVTQEPSLTVSPGGTVTLTCGSSTGAVTSGNYPNWVQQKPGQAPRGLIGGTKFLAPGTPARFSGSLLGGKAALTLSGVQPEDEAEYYCVLWYSNRWVFGGGTKLTVL

SEQ ID NO: 775 - protein, 986 aa, Artificial Sequence
  Synthetic peptide
EVQLLESGGGMVQPGGSLRLSCAASGFTFSSYAMSWVRQAPGKGLEWVSAISGSGGRTFYAESVEGRFTISRDNSKNTLYLQMNSLRAEDTAVYYCAKHDYSNYPYFDYWGQGTLVTVSSGGGGSGGGGSGGGGSEIVLTQSPGTLSLSPGERATLSCRASQSVRSSYLAWYQQKPGQAPRLLIYGASSRATGIPDRFSGSGSGTDFTLTISRLEPEDFAVYYCQQYGSSPFTFGPGTKVEIKSGGGGSEVQLVESGGGLVQPGGSLKLSCAASGFTFNKYAMNWVRQAPGKGLEWVARIRSKYNNYATYYADSVKDRFTISRDDSKNTAYLQMNNLKTEDTAVYYCVRHGNFGNSYISYWAYWGQGTLVTVSSGGGGSGGGGSGGGGSQTVVTQEPSLTVSPGGTVTLTCGSSTGAVTSGNYPNWVQQKPGQAPRGLIGGTKFLAPGTPARFSGSLLGGKAALTLSGVQPEDEAEYYCVLWYSNRWVFGGGTKLTVLGGGGDKTHTCPPCPAPELLGGPSVFLFPPKPKDTLMISRTPEVTCVVVDVSHEDPEVKFNWYVDGVEVHNAKTKPCEEQYGSTYRCVSVLTVLHQDWLNGKEYKCKVSNKALPAPIEKTISKAKGQPREPQVYTLPPSREEMTKNQVSLTCLVKGFYPSDIAVEWESNGQPENNYKTTPPVLDSDGSFFLYSKLTVDKSRWQQGNVFSCSVMHEALHNHYTQKSLSLSPGKGGGGSGGGGSGGGGSGGGGSGGGGSGGGGSDKTHTCPPCPAPELLGGPSVFLFPPKPKDTLMISRTPEVTCVVVDVSHEDPEVKFNWYVDGVEVHNAKTKPCEEQYGSTYRCVSVLTVLHQDWLNGKEYKCKVSNKALPAPIEKTISKAKGQPREPQVYTLPPSREEMTKNQVSLTCLVKGFYPSDIAVEWESNGQPENNYKTTPPVLDSDGSFFLYSKLTVDKSRWQQGNVFSCSVMHEALHNHYTQKSLSLSPGK

SEQ ID NO: 776 - protein, 5 aa, Artificial Sequence
  Synthetic peptide
SYAMS

SEQ ID NO: 777 - protein, 17 aa, Artificial Sequence
  Synthetic peptide
AISGSGGSTFYAESVQG

SEQ ID NO: 778 - protein, 11 aa, Artificial Sequence
  Synthetic peptide
HDYSNYPYFDY

SEQ ID NO: 779 - protein, 12 aa, Artificial Sequence
  Synthetic peptide
RASQSVRGNYLA

SEQ ID NO: 780 - protein, 7 aa, Artificial Sequence
  Synthetic peptide
GASSRAT

SEQ ID NO: 781 - protein, 9 aa, Artificial Sequence
  Synthetic peptide
QQYGYSPFT

SEQ ID NO: 782 - protein, 120 aa, Artificial Sequence
  Synthetic peptide
EVQLLESGGGLVQPGGSLRLSCAASGFTFSSYAMSWVRQAPGKCLEWVSAISGSGGSTFYAESVQGRFTISRDNSKNTLYLQVNSLRAEDTAVYYCARHDYSNYPYFDYWGQGTLVTVSS

SEQ ID NO: 783 - protein, 108 aa, Artificial Sequence
  Synthetic peptide
EIVLTQSPGTLSLSPGERATLSCRASQSVRGNYLAWYQQKPGQAPRLLIYGASSRATGIPDRFSGSGSGTDFTLTISRLEPEDFAVYYCQQYGYSPFTFGCGTKVEIK

SEQ ID NO: 784 - protein, 243 aa, Artificial Sequence
  Synthetic peptide
EVQLLESGGGLVQPGGSLRLSCAASGFTFSSYAMSWVRQAPGKCLEWVSAISGSGGSTFYAESVQGRFTISRDNSKNTLYLQVNSLRAEDTAVYYCARHDYSNYPYFDYWGQGTLVTVSSGGGGSGGGGSGGGGSEIVLTQSPGTLSLSPGERATLSCRASQSVRGNYLAWYQQKPGQAPRLLIYGASSRATGIPDRFSGSGSGTDFTLTISRLEPEDFAVYYCQQYGYSPFTFGCGTKVEIK

SEQ ID NO: 785 - protein, 498 aa, Artificial Sequence
  Synthetic peptide
EVQLLESGGGLVQPGGSLRLSCAASGFTFSSYAMSWVRQAPGKCLEWVSAISGSGGSTFYAESVQGRFTISRDNSKNTLYLQVNSLRAEDTAVYYCARHDYSNYPYFDYWGQGTLVTVSSGGGGSGGGGSGGGGSEIVLTQSPGTLSLSPGERATLSCRASQSVRGNYLAWYQQKPGQAPRLLIYGASSRATGIPDRFSGSGSGTDFTLTISRLEPEDFAVYYCQQYGYSPFTFGCGTKVEIKSGGGGSEVQLVESGGGLVQPGGSLKLSCAASGFTFNKYAMNWVRQAPGKGLEWVARIRSKYNNYATYYADSVKDRFTISRDDSKNTAYLQMNNLKTEDTAVYYCVRHGNFGNSYISYWAYWGQGTLVTVSSGGGGSGGGGSGGGGSQTVVTQEPSLTVSPGGTVTLTCGSSTGAVTSGNYPNWVQQKPGQAPRGLIGGTKFLAPGTPARFSGSLLGGKAALTLSGVQPEDEAEYYCVLWYSNRWVFGGGTKLTVL

SEQ ID NO: 786 - protein, 986 aa, Artificial Sequence
  Synthetic peptide
EVQLLESGGGLVQPGGSLRLSCAASGFTFSSYAMSWVRQAPGKCLEWVSAISGSGGSTFYAESVQGRFTISRDNSKNTLYLQVNSLRAEDTAVYYCARHDYSNYPYFDYWGQGTLVTVSSGGGGSGGGGSGGGGSEIVLTQSPGTLSLSPGERATLSCRASQSVRGNYLAWYQQKPGQAPRLLIYGASSRATGIPDRFSGSGSGTDFTLTISRLEPEDFAVYYCQQYGYSPFTFGCGTKVEIKSGGGGSEVQLVESGGGLVQPGGSLKLSCAASGFTFNKYAMNWVRQAPGKGLEWVARIRSKYNNYATYYADSVKDRFTISRDDSKNTAYLQMNNLKTEDTAVYYCVRHGNFGNSYISYWAYWGQGTLVTVSSGGGGSGGGGSGGGGSQTVVTQEPSLTVSPGGTVTLTCGSSTGAVTSGNYPNWVQQKPGQAPRGLIGGTKFLAPGTPARFSGSLLGGKAALTLSGVQPEDEAEYYCVLWYSNRWVFGGGTKLTVLGGGGDKTHTCPPCPAPELLGGPSVFLFPPKPKDTLMISRTPEVTCVVVDVSHEDPEVKFNWYVDGVEVHNAKTKPCEEQYGSTYRCVSVLTVLHQDWLNGKEYKCKVSNKALPAPIEKTISKAKGQPREPQVYTLPPSREEMTKNQVSLTCLVKGFYPSDIAVEWESNGQPENNYKTTPPVLDSDGSFFLYSKLTVDKSRWQQGNVFSCSVMHEALHNHYTQKSLSLSPGKGGGGSGGGGSGGGGSGGGGSGGGGSGGGGSDKTHTCPPCPAPELLGGPSVFLFPPKPKDTLMISRTPEVTCVVVDVSHEDPEVKFNWYVDGVEVHNAKTKPCEEQYGSTYRCVSVLTVLHQDWLNGKEYKCKVSNKALPAPIEKTISKAKGQPREPQVYTLPPSREEMTKNQVSLTCLVKGFYPSDIAVEWESNGQPENNYKTTPPVLDSDGSFFLYSKLTVDKSRWQQGNVFSCSVMHEALHNHYTQKSLSLSPGK

SEQ ID NO: 787 - protein, 120 aa, Artificial Sequence
  Synthetic peptide
EVQLLESGGGLVQPGGSLRLSCAASGFTFSSYAMSWVRQAPGKGLEWVSAISGSGGSTFYAESVQGRFTISRDNSKNTLYLQVNSLRAEDTAVYYCARHDYSNYPYFDYWGQGTLVTVSS

SEQ ID NO: 788 - protein, 108 aa, Artificial Sequence
  Synthetic peptide
EIVLTQSPGTLSLSPGERATLSCRASQSVRGNYLAWYQQKPGQAPRLLIYGASSRATGIPDRFSGSGSGTDFTLTISRLEPEDFAVYYCQQYGYSPFTFGPGTKVEIK

SEQ ID NO: 789 - protein, 243 aa, Artificial Sequence
  Synthetic peptide
EVQLLESGGGLVQPGGSLRLSCAASGFTFSSYAMSWVRQAPGKGLEWVSAISGSGGSTFYAESVQGRFTISRDNSKNTLYLQVNSLRAEDTAVYYCARHDYSNYPYFDYWGQGTLVTVSSGGGGSGGGGSGGGGSEIVLTQSPGTLSLSPGERATLSCRASQSVRGNYLAWYQQKPGQAPRLLIYGASSRATGIPDRFSGSGSGTDFTLTISRLEPEDFAVYYCQQYGYSPFTFGPGTKVEIK

SEQ ID NO: 790 - protein, 498 aa, Artificial Sequence
  Synthetic peptide
EVQLLESGGGLVQPGGSLRLSCAASGFTFSSYAMSWVRQAPGKGLEWVSAISGSGGSTFYAESVQGRFTISRDNSKNTLYLQVNSLRAEDTAVYYCARHDYSNYPYFDYWGQGTLVTVSSGGGGSGGGGSGGGGSEIVLTQSPGTLSLSPGERATLSCRASQSVRGNYLAWYQQKPGQAPRLLIYGASSRATGIPDRFSGSGSGTDFTLTISRLEPEDFAVYYCQQYGYSPFTFGPGTKVEIKSGGGGSEVQLVESGGGLVQPGGSLKLSCAASGFTFNKYAMNWVRQAPGKGLEWVARIRSKYNNYATYYADSVKDRFTISRDDSKNTAYLQMNNLKTEDTAVYYCVRHGNFGNSYISYWAYWGQGTLVTVSSGGGGSGGGGSGGGGSQTVVTQEPSLTVSPGGTVTLTCGSSTGAVTSGNYPNWVQQKPGQAPRGLIGGTKFLAPGTPARFSGSLLGGKAALTLSGVQPEDEAEYYCVLWYSNRWVFGGGTKLTVL

SEQ ID NO: 791 - protein, 986 aa, Artificial Sequence
  Synthetic peptide
EVQLLESGGGLVQPGGSLRLSCAASGFTFSSYAMSWVRQAPGKGLEWVSAISGSGGSTFYAESVQGRFTISRDNSKNTLYLQVNSLRAEDTAVYYCARHDYSNYPYFDYWGQGTLVTVSSGGGGSGGGGSGGGGSEIVLTQSPGTLSLSPGERATLSCRASQSVRGNYLAWYQQKPGQAPRLLIYGASSRATGIPDRFSGSGSGTDFTLTISRLEPEDFAVYYCQQYGYSPFTFGPGTKVEIKSGGGGSEVQLVESGGGLVQPGGSLKLSCAASGFTFNKYAMNWVRQAPGKGLEWVARIRSKYNNYATYYADSVKDRFTISRDDSKNTAYLQMNNLKTEDTAVYYCVRHGNFGNSYISYWAYWGQGTLVTVSSGGGGSGGGGSGGGGSQTVVTQEPSLTVSPGGTVTLTCGSSTGAVTSGNYPNWVQQKPGQAPRGLIGGTKFLAPGTPARFSGSLLGGKAALTLSGVQPEDEAEYYCVLWYSNRWVFGGGTKLTVLGGGGDKTHTCPPCPAPELLGGPSVFLFPPKPKDTLMISRTPEVTCVVVDVSHEDPEVKFNWYVDGVEVHNAKTKPCEEQYGSTYRCVSVLTVLHQDWLNGKEYKCKVSNKALPAPIEKTISKAKGQPREPQVYTLPPSREEMTKNQVSLTCLVKGFYPSDIAVEWESNGQPENNYKTTPPVLDSDGSFFLYSKLTVDKSRWQQGNVFSCSVMHEALHNHYTQKSLSLSPGKGGGGSGGGGSGGGGSGGGGSGGGGSGGGGSDKTHTCPPCPAPELLGGPSVFLFPPKPKDTLMISRTPEVTCVVVDVSHEDPEVKFNWYVDGVEVHNAKTKPCEEQYGSTYRCVSVLTVLHQDWLNGKEYKCKVSNKALPAPIEKTISKAKGQPREPQVYTLPPSREEMTKNQVSLTCLVKGFYPSDIAVEWESNGQPENNYKTTPPVLDSDGSFFLYSKLTVDKSRWQQGNVFSCSVMHEALHNHYTQKSLSLSPGK

SEQ ID NO: 792 - protein, 5 aa, Artificial Sequence
  Synthetic peptide
TYAMS

SEQ ID NO: 793 - protein, 17 aa, Artificial Sequence
  Synthetic peptide
AISGSGGGTFYAESVKG

SEQ ID NO: 794 - protein, 11 aa, Artificial Sequence
  Synthetic peptide
HDYSNYPYFDY

SEQ ID NO: 795 - protein, 12 aa, Artificial Sequence
  Synthetic peptide
RASQSIRSNYLA

SEQ ID NO: 796 - protein, 7 aa, Artificial Sequence
  Synthetic peptide
GASSRAT

SEQ ID NO: 797 - protein, 9 aa, Artificial Sequence
  Synthetic peptide
QQYGSSPFT

SEQ ID NO: 798 - protein, 120 aa, Artificial Sequence
  Synthetic peptide
EVQLLESGGGLVQPGGSLRLSCAASGFTFSTYAMSWVRQAPGKCLEWVSAISGSGGGTFYAESVKGRFTISRDNSKNTLYLQMNSLRAEDTAVYYCAKHDYSNYPYFDYWGQGTLVTVSS

SEQ ID NO: 799 - protein, 108 aa, Artificial Sequence
  Synthetic peptide
EIVLTQSPGTLSLSPGERATLSCRASQSIRSNYLAWYQQKPGQAPRLLIYGASSRATGIPDRFSGSGSGTDFTLTISRLEPEDFAVYYCQQYGSSPFTFGCGTKVEIK

SEQ ID NO: 800 - protein, 243 aa, Artificial Sequence
  Synthetic peptide
EVQLLESGGGLVQPGGSLRLSCAASGFTFSTYAMSWVRQAPGKCLEWVSAISGSGGGTFYAESVKGRFTISRDNSKNTLYLQMNSLRAEDTAVYYCAKHDYSNYPYFDYWGQGTLVTVSSGGGGSGGGGSGGGGSEIVLTQSPGTLSLSPGERATLSCRASQSIRSNYLAWYQQKPGQAPRLLIYGASSRATGIPDRFSGSGSGTDFTLTISRLEPEDFAVYYCQQYGSSPFTFGCGTKVEIK

SEQ ID NO: 801 - protein, 498 aa, Artificial Sequence
  Synthetic peptide
EVQLLESGGGLVQPGGSLRLSCAASGFTFSTYAMSWVRQAPGKCLEWVSAISGSGGGTFYAESVKGRFTISRDNSKNTLYLQMNSLRAEDTAVYYCAKHDYSNYPYFDYWGQGTLVTVSSGGGGSGGGGSGGGGSEIVLTQSPGTLSLSPGERATLSCRASQSIRSNYLAWYQQKPGQAPRLLIYGASSRATGIPDRFSGSGSGTDFTLTISRLEPEDFAVYYCQQYGSSPFTFGCGTKVEIKSGGGGSEVQLVESGGGLVQPGGSLKLSCAASGFTFNKYAMNWVRQAPGKGLEWVARIRSKYNNYATYYADSVKDRFTISRDDSKNTAYLQMNNLKTEDTAVYYCVRHGNFGNSYISYWAYWGQGTLVTVSSGGGGSGGGGSGGGGSQTVVTQEPSLTVSPGGTVTLTCGSSTGAVTSGNYPNWVQQKPGQAPRGLIGGTKFLAPGTPARFSGSLLGGKAALTLSGVQPEDEAEYYCVLWYSNRWVFGGGTKLTVL

SEQ ID NO: 802 - protein, 986 aa, Artificial Sequence
  Synthetic peptide
EVQLLESGGGLVQPGGSLRLSCAASGFTFSTYAMSWVRQAPGKCLEWVSAISGSGGGTFYAESVKGRFTISRDNSKNTLYLQMNSLRAEDTAVYYCAKHDYSNYPYFDYWGQGTLVTVSSGGGGSGGGGSGGGGSEIVLTQSPGTLSLSPGERATLSCRASQSIRSNYLAWYQQKPGQAPRLLIYGASSRATGIPDRFSGSGSGTDFTLTISRLEPEDFAVYYCQQYGSSPFTFGCGTKVEIKSGGGGSEVQLVESGGGLVQPGGSLKLSCAASGFTFNKYAMNWVRQAPGKGLEWVARIRSKYNNYATYYADSVKDRFTISRDDSKNTAYLQMNNLKTEDTAVYYCVRHGNFGNSYISYWAYWGQGTLVTVSSGGGGSGGGGSGGGGSQTVVTQEPSLTVSPGGTVTLTCGSSTGAVTSGNYPNWVQQKPGQAPRGLIGGTKFLAPGTPARFSGSLLGGKAALTLSGVQPEDEAEYYCVLWYSNRWVFGGGTKLTVLGGGGDKTHTCPPCPAPELLGGPSVFLFPPKPKDTLMISRTPEVTCVVVDVSHEDPEVKFNWYVDGVEVHNAKTKPCEEQYGSTYRCVSVLTVLHQDWLNGKEYKCKVSNKALPAPIEKTISKAKGQPREPQVYTLPPSREEMTKNQVSLTCLVKGFYPSDIAVEWESNGQPENNYKTTPPVLDSDGSFFLYSKLTVDKSRWQQGNVFSCSVMHEALHNHYTQKSLSLSPGKGGGGSGGGGSGGGGSGGGGSGGGGSGGGGSDKTHTCPPCPAPELLGGPSVFLFPPKPKDTLMISRTPEVTCVVVDVSHEDPEVKFNWYVDGVEVHNAKTKPCEEQYGSTYRCVSVLTVLHQDWLNGKEYKCKVSNKALPAPIEKTISKAKGQPREPQVYTLPPSREEMTKNQVSLTCLVKGFYPSDIAVEWESNGQPENNYKTTPPVLDSDGSFFLYSKLTVDKSRWQQGNVFSCSVMHEALHNHYTQKSLSLSPGK

SEQ ID NO: 803 - protein, 120 aa, Artificial Sequence
  Synthetic peptide
EVQLLESGGGLVQPGGSLRLSCAASGFTFSTYAMSWVRQAPGKGLEWVSAISGSGGGTFYAESVKGRFTISRDNSKNTLYLQMNSLRAEDTAVYYCAKHDYSNYPYFDYWGQGTLVTVSS

SEQ ID NO: 804 - protein, 108 aa, Artificial Sequence
  Synthetic peptide
EIVLTQSPGTLSLSPGERATLSCRASQSIRSNYLAWYQQKPGQAPRLLIYGASSRATGIPDRFSGSGSGTDFTLTISRLEPEDFAVYYCQQYGSSPFTFGPGTKVEIK

SEQ ID NO: 805 - protein, 243 aa, Artificial Sequence
  Synthetic peptide
EVQLLESGGGLVQPGGSLRLSCAASGFTFSTYAMSWVRQAPGKGLEWVSAISGSGGGTFYAESVKGRFTISRDNSKNTLYLQMNSLRAEDTAVYYCAKHDYSNYPYFDYWGQGTLVTVSSGGGGSGGGGSGGGGSEIVLTQSPGTLSLSPGERATLSCRASQSIRSNYLAWYQQKPGQAPRLLIYGASSRATGIPDRFSGSGSGTDFTLTISRLEPEDFAVYYCQQYGSSPFTFGPGTKVEIK

SEQ ID NO: 806 - protein, 498 aa, Artificial Sequence
  Synthetic peptide
EVQLLESGGGLVQPGGSLRLSCAASGFTFSTYAMSWVRQAPGKGLEWVSAISGSGGGTFYAESVKGRFTISRDNSKNTLYLQMNSLRAEDTAVYYCAKHDYSNYPYFDYWGQGTLVTVSSGGGGSGGGGSGGGGSEIVLTQSPGTLSLSPGERATLSCRASQSIRSNYLAWYQQKPGQAPRLLIYGASSRATGIPDRFSGSGSGTDFTLTISRLEPEDFAVYYCQQYGSSPFTFGPGTKVEIKSGGGGSEVQLVESGGGLVQPGGSLKLSCAASGFTFNKYAMNWVRQAPGKGLEWVARIRSKYNNYATYYADSVKDRFTISRDDSKNTAYLQMNNLKTEDTAVYYCVRHGNFGNSYISYWAYWGQGTLVTVSSGGGGSGGGGSGGGGSQTVVTQEPSLTVSPGGTVTLTCGSSTGAVTSGNYPNWVQQKPGQAPRGLIGGTKFLAPGTPARFSGSLLGGKAALTLSGVQPEDEAEYYCVLWYSNRWVFGGGTKLTVL

SEQ ID NO: 807 - protein, 986 aa, Artificial Sequence
  Synthetic peptide
EVQLLESGGGLVQPGGSLRLSCAASGFTFSTYAMSWVRQAPGKGLEWVSAISGSGGGTFYAESVKGRFTISRDNSKNTLYLQMNSLRAEDTAVYYCAKHDYSNYPYFDYWGQGTLVTVSSGGGGSGGGGSGGGGSEIVLTQSPGTLSLSPGERATLSCRASQSIRSNYLAWYQQKPGQAPRLLIYGASSRATGIPDRFSGSGSGTDFTLTISRLEPEDFAVYYCQQYGSSPFTFGPGTKVEIKSGGGGSEVQLVESGGGLVQPGGSLKLSCAASGFTFNKYAMNWVRQAPGKGLEWVARIRSKYNNYATYYADSVKDRFTISRDDSKNTAYLQMNNLKTEDTAVYYCVRHGNFGNSYISYWAYWGQGTLVTVSSGGGGSGGGGSGGGGSQTVVTQEPSLTVSPGGTVTLTCGSSTGAVTSGNYPNWVQQKPGQAPRGLIGGTKFLAPGTPARFSGSLLGGKAALTLSGVQPEDEAEYYCVLWYSNRWVFGGGTKLTVLGGGGDKTHTCPPCPAPELLGGPSVFLFPPKPKDTLMISRTPEVTCVVVDVSHEDPEVKFNWYVDGVEVHNAKTKPCEEQYGSTYRCVSVLTVLHQDWLNGKEYKCKVSNKALPAPIEKTISKAKGQPREPQVYTLPPSREEMTKNQVSLTCLVKGFYPSDIAVEWESNGQPENNYKTTPPVLDSDGSFFLYSKLTVDKSRWQQGNVFSCSVMHEALHNHYTQKSLSLSPGKGGGGSGGGGSGGGGSGGGGSGGGGSGGGGSDKTHTCPPCPAPELLGGPSVFLFPPKPKDTLMISRTPEVTCVVVDVSHEDPEVKFNWYVDGVEVHNAKTKPCEEQYGSTYRCVSVLTVLHQDWLNGKEYKCKVSNKALPAPIEKTISKAKGQPREPQVYTLPPSREEMTKNQVSLTCLVKGFYPSDIAVEWESNGQPENNYKTTPPVLDSDGSFFLYSKLTVDKSRWQQGNVFSCSVMHEALHNHYTQKSLSLSPGK

SEQ ID NO: 808 - protein, 5 aa, Artificial Sequence
  Synthetic peptide
TYAMS

SEQ ID NO: 809 - protein, 17 aa, Artificial Sequence
  Synthetic peptide
LISGSGGRTYYAESVKG

SEQ ID NO: 810 - protein, 11 aa, Artificial Sequence
  Synthetic peptide
HDYSNYPYFDY

SEQ ID NO: 811 - protein, 12 aa, Artificial Sequence
  Synthetic peptide
RASQSVRSNYLA

SEQ ID NO: 812 - protein, 7 aa, Artificial Sequence
  Synthetic peptide
GASNRAT

SEQ ID NO: 813 - protein, 9 aa, Artificial Sequence
  Synthetic peptide
QQYGISPPT

SEQ ID NO: 814 - protein, 120 aa, Artificial Sequence
  Synthetic peptide
EVQLLESGGGLVQPGGSLRLSCAASGFTFSTYAMSWVRQAPGKCLEWVSLISGSGGRTYYAESVKGRFTISRDNSKNTLYLQMNSLRAEDTAVYYCAKHDYSNYPYFDYWGQGTLVTVSS

SEQ ID NO: 815 - protein, 108 aa, Artificial Sequence
  Synthetic peptide
EIVLTQSPGTLSLSPGERATLSCRASQSVRSNYLAWYQQKPGQAPRLLIYGASNRATGIPDRFSGSGSGTDFTLTISRLEPEDFAVYSCQQYGISPPTFGCGTKVEIK

SEQ ID NO: 816 - protein, 243 aa, Artificial Sequence
  Synthetic peptide
EVQLLESGGGLVQPGGSLRLSCAASGFTFSTYAMSWVRQAPGKCLEWVSLISGSGGRTYYAESVKGRFTISRDNSKNTLYLQMNSLRAEDTAVYYCAKHDYSNYPYFDYWGQGTLVTVSSGGGGSGGGGSGGGGSEIVLTQSPGTLSLSPGERATLSCRASQSVRSNYLAWYQQKPGQAPRLLIYGASNRATGIPDRFSGSGSGTDFTLTISRLEPEDFAVYSCQQYGISPPTFGCGTKVEIK

SEQ ID NO: 817 - protein, 498 aa, Artificial Sequence
  Synthetic peptide
EVQLLESGGGLVQPGGSLRLSCAASGFTFSTYAMSWVRQAPGKCLEWVSLISGSGGRTYYAESVKGRFTISRDNSKNTLYLQMNSLRAEDTAVYYCAKHDYSNYPYFDYWGQGTLVTVSSGGGGSGGGGSGGGGSEIVLTQSPGTLSLSPGERATLSCRASQSVRSNYLAWYQQKPGQAPRLLIYGASNRATGIPDRFSGSGSGTDFTLTISRLEPEDFAVYSCQQYGISPPTFGCGTKVEIKSGGGGSEVQLVESGGGLVQPGGSLKLSCAASGFTFNKYAMNWVRQAPGKGLEWVARIRSKYNNYATYYADSVKDRFTISRDDSKNTAYLQMNNLKTEDTAVYYCVRHGNFGNSYISYWAYWGQGTLVTVSSGGGGSGGGGSGGGGSQTVVTQEPSLTVSPGGTVTLTCGSSTGAVTSGNYPNWVQQKPGQAPRGLIGGTKFLAPGTPARFSGSLLGGKAALTLSGVQPEDEAEYYCVLWYSNRWVFGGGTKLTVL

SEQ ID NO: 818 - protein, 986 aa, Artificial Sequence
  Synthetic peptide
EVQLLESGGGLVQPGGSLRLSCAASGFTFSTYAMSWVRQAPGKCLEWVSLISGSGGRTYYAESVKGRFTISRDNSKNTLYLQMNSLRAEDTAVYYCAKHDYSNYPYFDYWGQGTLVTVSSGGGGSGGGGSGGGGSEIVLTQSPGTLSLSPGERATLSCRASQSVRSNYLAWYQQKPGQAPRLLIYGASNRATGIPDRFSGSGSGTDFTLTISRLEPEDFAVYSCQQYGISPPTFGCGTKVEIKSGGGGSEVQLVESGGGLVQPGGSLKLSCAASGFTFNKYAMNWVRQAPGKGLEWVARIRSKYNNYATYYADSVKDRFTISRDDSKNTAYLQMNNLKTEDTAVYYCVRHGNFGNSYISYWAYWGQGTLVTVSSGGGGSGGGGSGGGGSQTVVTQEPSLTVSPGGTVTLTCGSSTGAVTSGNYPNWVQQKPGQAPRGLIGGTKFLAPGTPARFSGSLLGGKAALTLSGVQPEDEAEYYCVLWYSNRWVFGGGTKLTVLGGGGDKTHTCPPCPAPELLGGPSVFLFPPKPKDTLMISRTPEVTCVVVDVSHEDPEVKFNWYVDGVEVHNAKTKPCEEQYGSTYRCVSVLTVLHQDWLNGKEYKCKVSNKALPAPIEKTISKAKGQPREPQVYTLPPSREEMTKNQVSLTCLVKGFYPSDIAVEWESNGQPENNYKTTPPVLDSDGSFFLYSKLTVDKSRWQQGNVFSCSVMHEALHNHYTQKSLSLSPGKGGGGSGGGGSGGGGSGGGGSGGGGSGGGGSDKTHTCPPCPAPELLGGPSVFLFPPKPKDTLMISRTPEVTCVVVDVSHEDPEVKFNWYVDGVEVHNAKTKPCEEQYGSTYRCVSVLTVLHQDWLNGKEYKCKVSNKALPAPIEKTISKAKGQPREPQVYTLPPSREEMTKNQVSLTCLVKGFYPSDIAVEWESNGQPENNYKTTPPVLDSDGSFFLYSKLTVDKSRWQQGNVFSCSVMHEALHNHYTQKSLSLSPGK

SEQ ID NO: 819 - protein, 120 aa, Artificial Sequence
  Synthetic peptide
EVQLLESGGGLVQPGGSLRLSCAASGFTFSTYAMSWVRQAPGKGLEWVSLISGSGGRTYYAESVKGRFTISRDNSKNTLYLQMNSLRAEDTAVYYCAKHDYSNYPYFDYWGQGTLVTVSS

SEQ ID NO: 820 - protein, 108 aa, Artificial Sequence
  Synthetic peptide
EIVLTQSPGTLSLSPGERATLSCRASQSVRSNYLAWYQQKPGQAPRLLIYGASNRATGIPDRFSGSGSGTDFTLTISRLEPEDFAVYSCQQYGISPPTFGGGTKVEIK

SEQ ID NO: 821 - protein, 243 aa, Artificial Sequence
  Synthetic peptide
EVQLLESGGGLVQPGGSLRLSCAASGFTFSTYAMSWVRQAPGKGLEWVSLISGSGGRTYYAESVKGRFTISRDNSKNTLYLQMNSLRAEDTAVYYCAKHDYSNYPYFDYWGQGTLVTVSSGGGGSGGGGSGGGGSEIVLTQSPGTLSLSPGERATLSCRASQSVRSNYLAWYQQKPGQAPRLLIYGASNRATGIPDRFSGSGSGTDFTLTISRLEPEDFAVYSCQQYGISPPTFGGGTKVEIK

SEQ ID NO: 822 - protein, 498 aa, Artificial Sequence
  Synthetic peptide
EVQLLESGGGLVQPGGSLRLSCAASGFTFSTYAMSWVRQAPGKGLEWVSLISGSGGRTYYAESVKGRFTISRDNSKNTLYLQMNSLRAEDTAVYYCAKHDYSNYPYFDYWGQGTLVTVSSGGGGSGGGGSGGGGSEIVLTQSPGTLSLSPGERATLSCRASQSVRSNYLAWYQQKPGQAPRLLIYGASNRATGIPDRFSGSGSGTDFTLTISRLEPEDFAVYSCQQYGISPPTFGGGTKVEIKSGGGGSEVQLVESGGGLVQPGGSLKLSCAASGFTFNKYAMNWVRQAPGKGLEWVARIRSKYNNYATYYADSVKDRFTISRDDSKNTAYLQMNNLKTEDTAVYYCVRHGNFGNSYISYWAYWGQGTLVTVSSGGGGSGGGGSGGGGSQTVVTQEPSLTVSPGGTVTLTCGSSTGAVTSGNYPNWVQQKPGQAPRGLIGGTKFLAPGTPARFSGSLLGGKAALTLSGVQPEDEAEYYCVLWYSNRWVFGGGTKLTVL

SEQ ID NO: 823 - protein, 986 aa, Artificial Sequence
  Synthetic peptide
EVQLLESGGGLVQPGGSLRLSCAASGFTFSTYAMSWVRQAPGKGLEWVSLISGSGGRTYYAESVKGRFTISRDNSKNTLYLQMNSLRAEDTAVYYCAKHDYSNYPYFDYWGQGTLVTVSSGGGGSGGGGSGGGGSEIVLTQSPGTLSLSPGERATLSCRASQSVRSNYLAWYQQKPGQAPRLLIYGASNRATGIPDRFSGSGSGTDFTLTISRLEPEDFAVYSCQQYGISPPTFGGGTKVEIKSGGGGSEVQLVESGGGLVQPGGSLKLSCAASGFTFNKYAMNWVRQAPGKGLEWVARIRSKYNNYATYYADSVKDRFTISRDDSKNTAYLQMNNLKTEDTAVYYCVRHGNFGNSYISYWAYWGQGTLVTVSSGGGGSGGGGSGGGGSQTVVTQEPSLTVSPGGTVTLTCGSSTGAVTSGNYPNWVQQKPGQAPRGLIGGTKFLAPGTPARFSGSLLGGKAALTLSGVQPEDEAEYYCVLWYSNRWVFGGGTKLTVLGGGGDKTHTCPPCPAPELLGGPSVFLFPPKPKDTLMISRTPEVTCVVVDVSHEDPEVKFNWYVDGVEVHNAKTKPCEEQYGSTYRCVSVLTVLHQDWLNGKEYKCKVSNKALPAPIEKTISKAKGQPREPQVYTLPPSREEMTKNQVSLTCLVKGFYPSDIAVEWESNGQPENNYKTTPPVLDSDGSFFLYSKLTVDKSRWQQGNVFSCSVMHEALHNHYTQKSLSLSPGKGGGGSGGGGSGGGGSGGGGSGGGGSGGGGSDKTHTCPPCPAPELLGGPSVFLFPPKPKDTLMISRTPEVTCVVVDVSHEDPEVKFNWYVDGVEVHNAKTKPCEEQYGSTYRCVSVLTVLHQDWLNGKEYKCKVSNKALPAPIEKTISKAKGQPREPQVYTLPPSREEMTKNQVSLTCLVKGFYPSDIAVEWESNGQPENNYKTTPPVLDSDGSFFLYSKLTVDKSRWQQGNVFSCSVMHEALHNHYTQKSLSLSPGK

SEQ ID NO: 824 - protein, 5 aa, Artificial Sequence
  Synthetic peptide
SYAMS

SEQ ID NO: 825 - protein, 17 aa, Artificial Sequence
  Synthetic peptide
AISGSGGRAQYAESVQG

SEQ ID NO: 826 - protein, 11 aa, Artificial Sequence
  Synthetic peptide
HDYSNYPYFDY

SEQ ID NO: 827 - protein, 11 aa, Artificial Sequence
  Synthetic peptide
RASQSVSSNLA

SEQ ID NO: 828 - protein, 7 aa, Artificial Sequence
  Synthetic peptide
GSSSRAT

SEQ ID NO: 829 - protein, 9 aa, Artificial Sequence
  Synthetic peptide
QQYGSSPPP

SEQ ID NO: 830 - protein, 120 aa, Artificial Sequence
  Synthetic peptide
EVQLLESGGGLVQPGGSLRLSCAASGFTFSSYAMSWVRQSPGKCLEWVSAISGSGGRAQYAESVQGRFTVSRDNSKNTLYLQMNSLRAEDTAVYYCAKHDYSNYPYFDYWGQGTLVTVSS

SEQ ID NO: 831 - protein, 107 aa, Artificial Sequence
  Synthetic peptide
EIVLTQSPATLSVSPGERATLSCRASQSVSSNLAWYQQKPGQAPRLLIYGSSSRATGIPDRFSGSGSGTDFTLTISRLEPEDFAVYYCQQYGSSPPPFGCGTKVEIK

SEQ ID NO: 832 - protein, 242 aa, Artificial Sequence
  Synthetic peptide
EVQLLESGGGLVQPGGSLRLSCAASGFTFSSYAMSWVRQSPGKCLEWVSAISGSGGRAQYAESVQGRFTVSRDNSKNTLYLQMNSLRAEDTAVYYCAKHDYSNYPYFDYWGQGTLVTVSSGGGGSGGGGSGGGGSEIVLTQSPATLSVSPGERATLSCRASQSVSSNLAWYQQKPGQAPRLLIYGSSSRATGIPDRFSGSGSGTDFTLTISRLEPEDFAVYYCQQYGSSPPPFGCGTKVEIK

SEQ ID NO: 833 - protein, 497 aa, Artificial Sequence
  Synthetic peptide
EVQLLESGGGLVQPGGSLRLSCAASGFTFSSYAMSWVRQSPGKCLEWVSAISGSGGRAQYAESVQGRFTVSRDNSKNTLYLQMNSLRAEDTAVYYCAKHDYSNYPYFDYWGQGTLVTVSSGGGGSGGGGSGGGGSEIVLTQSPATLSVSPGERATLSCRASQSVSSNLAWYQQKPGQAPRLLIYGSSSRATGIPDRFSGSGSGTDFTLTISRLEPEDFAVYYCQQYGSSPPPFGCGTKVEIKSGGGGSEVQLVESGGGLVQPGGSLKLSCAASGFTFNKYAMNWVRQAPGKGLEWVARIRSKYNNYATYYADSVKDRFTISRDDSKNTAYLQMNNLKTEDTAVYYCVRHGNFGNSYISYWAYWGQGTLVTVSSGGGGSGGGGSGGGGSQTVVTQEPSLTVSPGGTVTLTCGSSTGAVTSGNYPNWVQQKPGQAPRGLIGGTKFLAPGTPARFSGSLLGGKAALTLSGVQPEDEAEYYCVLWYSNRWVFGGGTKLTVL

SEQ ID NO: 834 - protein, 985 aa, Artificial Sequence
  Synthetic peptide
EVQLLESGGGLVQPGGSLRLSCAASGFTFSSYAMSWVRQSPGKCLEWVSAISGSGGRAQYAESVQGRFTVSRDNSKNTLYLQMNSLRAEDTAVYYCAKHDYSNYPYFDYWGQGTLVTVSSGGGGSGGGGSGGGGSEIVLTQSPATLSVSPGERATLSCRASQSVSSNLAWYQQKPGQAPRLLIYGSSSRATGIPDRFSGSGSGTDFTLTISRLEPEDFAVYYCQQYGSSPPPFGCGTKVEIKSGGGGSEVQLVESGGGLVQPGGSLKLSCAASGFTFNKYAMNWVRQAPGKGLEWVARIRSKYNNYATYYADSVKDRFTISRDDSKNTAYLQMNNLKTEDTAVYYCVRHGNFGNSYISYWAYWGQGTLVTVSSGGGGSGGGGSGGGGSQTVVTQEPSLTVSPGGTVTLTCGSSTGAVTSGNYPNWVQQKPGQAPRGLIGGTKFLAPGTPARFSGSLLGGKAALTLSGVQPEDEAEYYCVLWYSNRWVFGGGTKLTVLGGGGDKTHTCPPCPAPELLGGPSVFLFPPKPKDTLMISRTPEVTCVVVDVSHEDPEVKFNWYVDGVEVHNAKTKPCEEQYGSTYRCVSVLTVLHQDWLNGKEYKCKVSNKALPAPIEKTISKAKGQPREPQVYTLPPSREEMTKNQVSLTCLVKGFYPSDIAVEWESNGQPENNYKTTPPVLDSDGSFFLYSKLTVDKSRWQQGNVFSCSVMHEALHNHYTQKSLSLSPGKGGGGSGGGGSGGGGSGGGGSGGGGSGGGGSDKTHTCPPCPAPELLGGPSVFLFPPKPKDTLMISRTPEVTCVVVDVSHEDPEVKFNWYVDGVEVHNAKTKPCEEQYGSTYRCVSVLTVLHQDWLNGKEYKCKVSNKALPAPIEKTISKAKGQPREPQVYTLPPSREEMTKNQVSLTCLVKGFYPSDIAVEWESNGQPENNYKTTPPVLDSDGSFFLYSKLTVDKSRWQQGNVFSCSVMHEALHNHYTQKSLSLSPGK

SEQ ID NO: 835 - protein, 120 aa, Artificial Sequence
  Synthetic peptide
EVQLLESGGGLVQPGGSLRLSCAASGFTFSSYAMSWVRQSPGKGLEWVSAISGSGGRAQYAESVQGRFTVSRDNSKNTLYLQMNSLRAEDTAVYYCAKHDYSNYPYFDYWGQGTLVTVSS

SEQ ID NO: 836 - protein, 107 aa, Artificial Sequence
  Synthetic peptide
EIVLTQSPATLSVSPGERATLSCRASQSVSSNLAWYQQKPGQAPRLLIYGSSSRATGIPDRFSGSGSGTDFTLTISRLEPEDFAVYYCQQYGSSPPPFGGGTKVEIK

SEQ ID NO: 837 - protein, 242 aa, Artificial Sequence
  Synthetic peptide
EVQLLESGGGLVQPGGSLRLSCAASGFTFSSYAMSWVRQSPGKGLEWVSAISGSGGRAQYAESVQGRFTVSRDNSKNTLYLQMNSLRAEDTAVYYCAKHDYSNYPYFDYWGQGTLVTVSSGGGGSGGGGSGGGGSEIVLTQSPATLSVSPGERATLSCRASQSVSSNLAWYQQKPGQAPRLLIYGSSSRATGIPDRFSGSGSGTDFTLTISRLEPEDFAVYYCQQYGSSPPPFGGGTKVEIK

SEQ ID NO: 838 - protein, 497 aa, Artificial Sequence
  Synthetic peptide
EVQLLESGGGLVQPGGSLRLSCAASGFTFSSYAMSWVRQSPGKGLEWVSAISGSGGRAQYAESVQGRFTVSRDNSKNTLYLQMNSLRAEDTAVYYCAKHDYSNYPYFDYWGQGTLVTVSSGGGGSGGGGSGGGGSEIVLTQSPATLSVSPGERATLSCRASQSVSSNLAWYQQKPGQAPRLLIYGSSSRATGIPDRFSGSGSGTDFTLTISRLEPEDFAVYYCQQYGSSPPPFGGGTKVEIKSGGGGSEVQLVESGGGLVQPGGSLKLSCAASGFTFNKYAMNWVRQAPGKGLEWVARIRSKYNNYATYYADSVKDRFTISRDDSKNTAYLQMNNLKTEDTAVYYCVRHGNFGNSYISYWAYWGQGTLVTVSSGGGGSGGGGSGGGGSQTVVTQEPSLTVSPGGTVTLTCGSSTGAVTSGNYPNWVQQKPGQAPRGLIGGTKFLAPGTPARFSGSLLGGKAALTLSGVQPEDEAEYYCVLWYSNRWVFGGGTKLTVL

SEQ ID NO: 839 - protein, 985 aa, Artificial Sequence
  Synthetic peptide
EVQLLESGGGLVQPGGSLRLSCAASGFTFSSYAMSWVRQSPGKGLEWVSAISGSGGRAQYAESVQGRFTVSRDNSKNTLYLQMNSLRAEDTAVYYCAKHDYSNYPYFDYWGQGTLVTVSSGGGGSGGGGSGGGGSEIVLTQSPATLSVSPGERATLSCRASQSVSSNLAWYQQKPGQAPRLLIYGSSSRATGIPDRFSGSGSGTDFTLTISRLEPEDFAVYYCQQYGSSPPPFGGGTKVEIKSGGGGSEVQLVESGGGLVQPGGSLKLSCAASGFTFNKYAMNWVRQAPGKGLEWVARIRSKYNNYATYYADSVKDRFTISRDDSKNTAYLQMNNLKTEDTAVYYCVRHGNFGNSYISYWAYWGQGTLVTVSSGGGGSGGGGSGGGGSQTVVTQEPSLTVSPGGTVTLTCGSSTGAVTSGNYPNWVQQKPGQAPRGLIGGTKFLAPGTPARFSGSLLGGKAALTLSGVQPEDEAEYYCVLWYSNRWVFGGGTKLTVLGGGGDKTHTCPPCPAPELLGGPSVFLFPPKPKDTLMISRTPEVTCVVVDVSHEDPEVKFNWYVDGVEVHNAKTKPCEEQYGSTYRCVSVLTVLHQDWLNGKEYKCKVSNKALPAPIEKTISKAKGQPREPQVYTLPPSREEMTKNQVSLTCLVKGFYPSDIAVEWESNGQPENNYKTTPPVLDSDGSFFLYSKLTVDKSRWQQGNVFSCSVMHEALHNHYTQKSLSLSPGKGGGGSGGGGSGGGGSGGGGSGGGGSGGGGSDKTHTCPPCPAPELLGGPSVFLFPPKPKDTLMISRTPEVTCVVVDVSHEDPEVKFNWYVDGVEVHNAKTKPCEEQYGSTYRCVSVLTVLHQDWLNGKEYKCKVSNKALPAPIEKTISKAKGQPREPQVYTLPPSREEMTKNQVSLTCLVKGFYPSDIAVEWESNGQPENNYKTTPPVLDSDGSFFLYSKLTVDKSRWQQGNVFSCSVMHEALHNHYTQKSLSLSPGK

SEQ ID NO: 840 - protein, 5 aa, Artificial Sequence
  Synthetic peptide
SYAMS

SEQ ID NO: 841 - protein, 17 aa, Artificial Sequence
  Synthetic peptide
AISGSGGRTFYAESVEG

SEQ ID NO: 842 - protein, 11 aa, Artificial Sequence
  Synthetic peptide
HDYSNYPYFDY

SEQ ID NO: 843 - protein, 12 aa, Artificial Sequence
  Synthetic peptide
RASQGVRSDYLA

SEQ ID NO: 844 - protein, 7 aa, Artificial Sequence
  Synthetic peptide
GASSRAT

SEQ ID NO: 845 - protein, 9 aa, Artificial Sequence
  Synthetic peptide
QQYGSTPPT

SEQ ID NO: 846 - protein, 120 aa, Artificial Sequence
  Synthetic peptide
EVQLLESGGGMVQPGGSLRLSCAASGFTFSSYAMSWVRQAPGKCLEWVSAISGSGGRTFYAESVEGRFTISRDNSKNTLYLQMNSLRAEDTAVYYCTKHDYSNYPYFDYWGQGTLVTVSS

SEQ ID NO: 847 - protein, 108 aa, Artificial Sequence
  Synthetic peptide
EIVLTQSPGTLSLSPGERATLSCRASQGVRSDYLAWYQQKPGQAPRLLIYGASSRATGIPDRFSGSGSGTDFTLTISRLEPEDFAVYHCQQYGSTPPTFGCGTKVEIK

SEQ ID NO: 848 - protein, 243 aa, Artificial Sequence
  Synthetic peptide
EVQLLESGGGMVQPGGSLRLSCAASGFTFSSYAMSWVRQAPGKCLEWVSAISGSGGRTFYAESVEGRFTISRDNSKNTLYLQMNSLRAEDTAVYYCTKHDYSNYPYFDYWGQGTLVTVSSGGGGSGGGGSGGGGSEIVLTQSPGTLSLSPGERATLSCRASQGVRSDYLAWYQQKPGQAPRLLIYGASSRATGIPDRFSGSGSGTDFTLTISRLEPEDFAVYHCQQYGSTPPTFGCGTKVEIK

SEQ ID NO: 849 - protein, 498 aa, Artificial Sequence
  Synthetic peptide
EVQLLESGGGMVQPGGSLRLSCAASGFTFSSYAMSWVRQAPGKCLEWVSAISGSGGRTFYAESVEGRFTISRDNSKNTLYLQMNSLRAEDTAVYYCTKHDYSNYPYFDYWGQGTLVTVSSGGGGSGGGGSGGGGSEIVLTQSPGTLSLSPGERATLSCRASQGVRSDYLAWYQQKPGQAPRLLIYGASSRATGIPDRFSGSGSGTDFTLTISRLEPEDFAVYHCQQYGSTPPTFGCGTKVEIKSGGGGSEVQLVESGGGLVQPGGSLKLSCAASGFTFNKYAMNWVRQAPGKGLEWVARIRSKYNNYATYYADSVKDRFTISRDDSKNTAYLQMNNLKTEDTAVYYCVRHGNFGNSYISYWAYWGQGTLVTVSSGGGGSGGGGSGGGGSQTVVTQEPSLTVSPGGTVTLTCGSSTGAVTSGNYPNWVQQKPGQAPRGLIGGTKFLAPGTPARFSGSLLGGKAALTLSGVQPEDEAEYYCVLWYSNRWVFGGGTKLTVL

SEQ ID NO: 850 - protein, 986 aa, Artificial Sequence
  Synthetic peptide
EVQLLESGGGMVQPGGSLRLSCAASGFTFSSYAMSWVRQAPGKCLEWVSAISGSGGRTFYAESVEGRFTISRDNSKNTLYLQMNSLRAEDTAVYYCTKHDYSNYPYFDYWGQGTLVTVSSGGGGSGGGGSGGGGSEIVLTQSPGTLSLSPGERATLSCRASQGVRSDYLAWYQQKPGQAPRLLIYGASSRATGIPDRFSGSGSGTDFTLTISRLEPEDFAVYHCQQYGSTPPTFGCGTKVEIKSGGGGSEVQLVESGGGLVQPGGSLKLSCAASGFTFNKYAMNWVRQAPGKGLEWVARIRSKYNNYATYYADSVKDRFTISRDDSKNTAYLQMNNLKTEDTAVYYCVRHGNFGNSYISYWAYWGQGTLVTVSSGGGGSGGGGSGGGGSQTVVTQEPSLTVSPGGTVTLTCGSSTGAVTSGNYPNWVQQKPGQAPRGLIGGTKFLAPGTPARFSGSLLGGKAALTLSGVQPEDEAEYYCVLWYSNRWVFGGGTKLTVLGGGGDKTHTCPPCPAPELLGGPSVFLFPPKPKDTLMISRTPEVTCVVVDVSHEDPEVKFNWYVDGVEVHNAKTKPCEEQYGSTYRCVSVLTVLHQDWLNGKEYKCKVSNKALPAPIEKTISKAKGQPREPQVYTLPPSREEMTKNQVSLTCLVKGFYPSDIAVEWESNGQPENNYKTTPPVLDSDGSFFLYSKLTVDKSRWQQGNVFSCSVMHEALHNHYTQKSLSLSPGKGGGGSGGGGSGGGGSGGGGSGGGGSGGGGSDKTHTCPPCPAPELLGGPSVFLFPPKPKDTLMISRTPEVTCVVVDVSHEDPEVKFNWYVDGVEVHNAKTKPCEEQYGSTYRCVSVLTVLHQDWLNGKEYKCKVSNKALPAPIEKTISKAKGQPREPQVYTLPPSREEMTKNQVSLTCLVKGFYPSDIAVEWESNGQPENNYKTTPPVLDSDGSFFLYSKLTVDKSRWQQGNVFSCSVMHEALHNHYTQKSLSLSPGK

SEQ ID NO: 851 - protein, 120 aa, Artificial Sequence
  Synthetic peptide
EVQLLESGGGMVQPGGSLRLSCAASGFTFSSYAMSWVRQAPGKGLEWVSAISGSGGRTFYAESVEGRFTISRDNSKNTLYLQMNSLRAEDTAVYYCTKHDYSNYPYFDYWGQGTLVTVSS

SEQ ID NO: 852 - protein, 108 aa, Artificial Sequence
  Synthetic peptide
EIVLTQSPGTLSLSPGERATLSCRASQGVRSDYLAWYQQKPGQAPRLLIYGASSRATGIPDRFSGSGSGTDFTLTISRLEPEDFAVYHCQQYGSTPPTFGGGTKVEIK

SEQ ID NO: 853 - protein, 243 aa, Artificial Sequence
  Synthetic peptide
EVQLLESGGGMVQPGGSLRLSCAASGFTFSSYAMSWVRQAPGKGLEWVSAISGSGGRTFYAESVEGRFTISRDNSKNTLYLQMNSLRAEDTAVYYCTKHDYSNYPYFDYWGQGTLVTVSSGGGGSGGGGSGGGGSEIVLTQSPGTLSLSPGERATLSCRASQGVRSDYLAWYQQKPGQAPRLLIYGASSRATGIPDRFSGSGSGTDFTLTISRLEPEDFAVYHCQQYGSTPPTFGGGTKVEIK

SEQ ID NO: 854 - protein, 498 aa, Artificial Sequence
  Synthetic peptide
EVQLLESGGGMVQPGGSLRLSCAASGFTFSSYAMSWVRQAPGKGLEWVSAISGSGGRTFYAESVEGRFTISRDNSKNTLYLQMNSLRAEDTAVYYCTKHDYSNYPYFDYWGQGTLVTVSSGGGGSGGGGSGGGGSEIVLTQSPGTLSLSPGERATLSCRASQGVRSDYLAWYQQKPGQAPRLLIYGASSRATGIPDRFSGSGSGTDFTLTISRLEPEDFAVYHCQQYGSTPPTFGGGTKVEIKSGGGGSEVQLVESGGGLVQPGGSLKLSCAASGFTFNKYAMNWVRQAPGKGLEWVARIRSKYNNYATYYADSVKDRFTISRDDSKNTAYLQMNNLKTEDTAVYYCVRHGNFGNSYISYWAYWGQGTLVTVSSGGGGSGGGGSGGGGSQTVVTQEPSLTVSPGGTVTLTCGSSTGAVTSGNYPNWVQQKPGQAPRGLIGGTKFLAPGTPARFSGSLLGGKAALTLSGVQPEDEAEYYCVLWYSNRWVFGGGTKLTVL

SEQ ID NO: 855 - protein, 986 aa, Artificial Sequence
  Synthetic peptide
EVQLLESGGGMVQPGGSLRLSCAASGFTFSSYAMSWVRQAPGKGLEWVSAISGSGGRTFYAESVEGRFTISRDNSKNTLYLQMNSLRAEDTAVYYCTKHDYSNYPYFDYWGQGTLVTVSSGGGGSGGGGSGGGGSEIVLTQSPGTLSLSPGERATLSCRASQGVRSDYLAWYQQKPGQAPRLLIYGASSRATGIPDRFSGSGSGTDFTLTISRLEPEDFAVYHCQQYGSTPPTFGGGTKVEIKSGGGGSEVQLVESGGGLVQPGGSLKLSCAASGFTFNKYAMNWVRQAPGKGLEWVARIRSKYNNYATYYADSVKDRFTISRDDSKNTAYLQMNNLKTEDTAVYYCVRHGNFGNSYISYWAYWGQGTLVTVSSGGGGSGGGGSGGGGSQTVVTQEPSLTVSPGGTVTLTCGSSTGAVTSGNYPNWVQQKPGQAPRGLIGGTKFLAPGTPARFSGSLLGGKAALTLSGVQPEDEAEYYCVLWYSNRWVFGGGTKLTVLGGGGDKTHTCPPCPAPELLGGPSVFLFPPKPKDTLMISRTPEVTCVVVDVSHEDPEVKFNWYVDGVEVHNAKTKPCEEQYGSTYRCVSVLTVLHQDWLNGKEYKCKVSNKALPAPIEKTISKAKGQPREPQVYTLPPSREEMTKNQVSLTCLVKGFYPSDIAVEWESNGQPENNYKTTPPVLDSDGSFFLYSKLTVDKSRWQQGNVFSCSVMHEALHNHYTQKSLSLSPGKGGGGSGGGGSGGGGSGGGGSGGGGSGGGGSDKTHTCPPCPAPELLGGPSVFLFPPKPKDTLMISRTPEVTCVVVDVSHEDPEVKFNWYVDGVEVHNAKTKPCEEQYGSTYRCVSVLTVLHQDWLNGKEYKCKVSNKALPAPIEKTISKAKGQPREPQVYTLPPSREEMTKNQVSLTCLVKGFYPSDIAVEWESNGQPENNYKTTPPVLDSDGSFFLYSKLTVDKSRWQQGNVFSCSVMHEALHNHYTQKSLSLSPGK

SEQ ID NO: 856 - protein, 5 aa, Artificial Sequence
  Synthetic peptide
SYAMS

SEQ ID NO: 857 - protein, 17 aa, Artificial Sequence
  Synthetic peptide
AIGEGGGYTYYAESVKG

SEQ ID NO: 858 - protein, 11 aa, Artificial Sequence
  Synthetic peptide
HDYSNYPYFDY

SEQ ID NO: 859 - protein, 12 aa, Artificial Sequence
  Synthetic peptide
RASQGVRSSYFA

SEQ ID NO: 860 - protein, 7 aa, Artificial Sequence
  Synthetic peptide
GASTRAT

SEQ ID NO: 861 - protein, 9 aa, Artificial Sequence
  Synthetic peptide
QQYGSSPPT

SEQ ID NO: 862 - protein, 119 aa, Artificial Sequence
  Synthetic peptide
EVQLLESGGGLVQPGGSLRLSCAASGFTFSSYAMSWVRQAPGKCLEWVSAIGEGGGYTYYAESVKGRFTISRDNSKNTLSLLMNSLRAEDTAVYYCARHDYSNYPYFDYWGQGTLVTVS

SEQ ID NO: 863 - protein, 108 aa, Artificial Sequence
  Synthetic peptide
EIVLTQSPGTLSLSPGERATLSCRASQGVRSSYFAWYQQKPGQAPRLLIYGASTRATGIPARFSGSGSGTDFTLTISRLEPEDFAVYYCQQYGSSPPTFGCGTKVEIK

SEQ ID NO: 864 - protein, 243 aa, Artificial Sequence
  Synthetic peptide
EVQLLESGGGLVQPGGSLRLSCAASGFTFSSYAMSWVRQAPGKCLEWVSAIGEGGGYTYYAESVKGRFTISRDNSKNTLSLLMNSLRAEDTAVYYCARHDYSNYPYFDYWGQGTLVTVSSGGGGSGGGGSGGGGSEIVLTQSPGTLSLSPGERATLSCRASQGVRSSYFAWYQQKPGQAPRLLIYGASTRATGIPARFSGSGSGTDFTLTISRLEPEDFAVYYCQQYGSSPPTFGCGTKVEIK

SEQ ID NO: 865 - protein, 498 aa, Artificial Sequence
  Synthetic peptide
EVQLLESGGGLVQPGGSLRLSCAASGFTFSSYAMSWVRQAPGKCLEWVSAIGEGGGYTYYAESVKGRFTISRDNSKNTLSLLMNSLRAEDTAVYYCARHDYSNYPYFDYWGQGTLVTVSSGGGGSGGGGSGGGGSEIVLTQSPGTLSLSPGERATLSCRASQGVRSSYFAWYQQKPGQAPRLLIYGASTRATGIPARFSGSGSGTDFTLTISRLEPEDFAVYYCQQYGSSPPTFGCGTKVEIKSGGGGSEVQLVESGGGLVQPGGSLKLSCAASGFTFNKYAMNWVRQAPGKGLEWVARIRSKYNNYATYYADSVKDRFTISRDDSKNTAYLQMNNLKTEDTAVYYCVRHGNFGNSYISYWAYWGQGTLVTVSSGGGGSGGGGSGGGGSQTVVTQEPSLTVSPGGTVTLTCGSSTGAVTSGNYPNWVQQKPGQAPRGLIGGTKFLAPGTPARFSGSLLGGKAALTLSGVQPEDEAEYYCVLWYSNRWVFGGGTKLTVL

SEQ ID NO: 866 - protein, 986 aa, Artificial Sequence
  Synthetic peptide
EVQLLESGGGLVQPGGSLRLSCAASGFTFSSYAMSWVRQAPGKCLEWVSAIGEGGGYTYYAESVKGRFTISRDNSKNTLSLLMNSLRAEDTAVYYCARHDYSNYPYFDYWGQGTLVTVSSGGGGSGGGGSGGGGSEIVLTQSPGTLSLSPGERATLSCRASQGVRSSYFAWYQQKPGQAPRLLIYGASTRATGIPARFSGSGSGTDFTLTISRLEPEDFAVYYCQQYGSSPPTFGCGTKVEIKSGGGGSEVQLVESGGGLVQPGGSLKLSCAASGFTFNKYAMNWVRQAPGKGLEWVARIRSKYNNYATYYADSVKDRFTISRDDSKNTAYLQMNNLKTEDTAVYYCVRHGNFGNSYISYWAYWGQGTLVTVSSGGGGSGGGGSGGGGSQTVVTQEPSLTVSPGGTVTLTCGSSTGAVTSGNYPNWVQQKPGQAPRGLIGGTKFLAPGTPARFSGSLLGGKAALTLSGVQPEDEAEYYCVLWYSNRWVFGGGTKLTVLGGGGDKTHTCPPCPAPELLGGPSVFLFPPKPKDTLMISRTPEVTCVVVDVSHEDPEVKFNWYVDGVEVHNAKTKPCEEQYGSTYRCVSVLTVLHQDWLNGKEYKCKVSNKALPAPIEKTISKAKGQPREPQVYTLPPSREEMTKNQVSLTCLVKGFYPSDIAVEWESNGQPENNYKTTPPVLDSDGSFFLYSKLTVDKSRWQQGNVFSCSVMHEALHNHYTQKSLSLSPGKGGGGSGGGGSGGGGSGGGGSGGGGSGGGGSDKTHTCPPCPAPELLGGPSVFLFPPKPKDTLMISRTPEVTCVVVDVSHEDPEVKFNWYVDGVEVHNAKTKPCEEQYGSTYRCVSVLTVLHQDWLNGKEYKCKVSNKALPAPIEKTISKAKGQPREPQVYTLPPSREEMTKNQVSLTCLVKGFYPSDIAVEWESNGQPENNYKTTPPVLDSDGSFFLYSKLTVDKSRWQQGNVFSCSVMHEALHNHYTQKSLSLSPGK

SEQ ID NO: 867 - protein, 120 aa, Artificial Sequence
  Synthetic peptide
EVQLLESGGGLVQPGGSLRLSCAASGFTFSSYAMSWVRQAPGKGLEWVSAIGEGGGYTYYAESVKGRFTISRDNSKNTLSLLMNSLRAEDTAVYYCARHDYSNYPYFDYWGQGTLVTVSS

SEQ ID NO: 868 - protein, 108 aa, Artificial Sequence
  Synthetic peptide
EIVLTQSPGTLSLSPGERATLSCRASQGVRSSYFAWYQQKPGQAPRLLIYGASTRATGIPARFSGSGSGTDFTLTISRLEPEDFAVYYCQQYGSSPPTFGQGTKVEIK

SEQ ID NO: 869 - protein, 243 aa, Artificial Sequence
  Synthetic peptide
EVQLLESGGGLVQPGGSLRLSCAASGFTFSSYAMSWVRQAPGKGLEWVSAIGEGGGYTYYAESVKGRFTISRDNSKNTLSLLMNSLRAEDTAVYYCARHDYSNYPYFDYWGQGTLVTVSSGGGGSGGGGSGGGGSEIVLTQSPGTLSLSPGERATLSCRASQGVRSSYFAWYQQKPGQAPRLLIYGASTRATGIPARFSGSGSGTDFTLTISRLEPEDFAVYYCQQYGSSPPTFGQGTKVEIK

SEQ ID NO: 870 - protein, 498 aa, Artificial Sequence
  Synthetic peptide
EVQLLESGGGLVQPGGSLRLSCAASGFTFSSYAMSWVRQAPGKGLEWVSAIGEGGGYTYYAESVKGRFTISRDNSKNTLSLLMNSLRAEDTAVYYCARHDYSNYPYFDYWGQGTLVTVSSGGGGSGGGGSGGGGSEIVLTQSPGTLSLSPGERATLSCRASQGVRSSYFAWYQQKPGQAPRLLIYGASTRATGIPARFSGSGSGTDFTLTISRLEPEDFAVYYCQQYGSSPPTFGQGTKVEIKSGGGGSEVQLVESGGGLVQPGGSLKLSCAASGFTFNKYAMNWVRQAPGKGLEWVARIRSKYNNYATYYADSVKDRFTISRDDSKNTAYLQMNNLKTEDTAVYYCVRHGNFGNSYISYWAYWGQGTLVTVSSGGGGSGGGGSGGGGSQTVVTQEPSLTVSPGGTVTLTCGSSTGAVTSGNYPNWVQQKPGQAPRGLIGGTKFLAPGTPARFSGSLLGGKAALTLSGVQPEDEAEYYCVLWYSNRWVFGGGTKLTVL

SEQ ID NO: 871 - protein, 986 aa, Artificial Sequence
  Synthetic peptide
EVQLLESGGGLVQPGGSLRLSCAASGFTFSSYAMSWVRQAPGKGLEWVSAIGEGGGYTYYAESVKGRFTISRDNSKNTLSLLMNSLRAEDTAVYYCARHDYSNYPYFDYWGQGTLVTVSSGGGGSGGGGSGGGGSEIVLTQSPGTLSLSPGERATLSCRASQGVRSSYFAWYQQKPGQAPRLLIYGASTRATGIPARFSGSGSGTDFTLTISRLEPEDFAVYYCQQYGSSPPTFGQGTKVEIKSGGGGSEVQLVESGGGLVQPGGSLKLSCAASGFTFNKYAMNWVRQAPGKGLEWVARIRSKYNNYATYYADSVKDRFTISRDDSKNTAYLQMNNLKTEDTAVYYCVRHGNFGNSYISYWAYWGQGTLVTVSSGGGGSGGGGSGGGGSQTVVTQEPSLTVSPGGTVTLTCGSSTGAVTSGNYPNWVQQKPGQAPRGLIGGTKFLAPGTPARFSGSLLGGKAALTLSGVQPEDEAEYYCVLWYSNRWVFGGGTKLTVLGGGGDKTHTCPPCPAPELLGGPSVFLFPPKPKDTLMISRTPEVTCVVVDVSHEDPEVKFNWYVDGVEVHNAKTKPCEEQYGSTYRCVSVLTVLHQDWLNGKEYKCKVSNKALPAPIEKTISKAKGQPREPQVYTLPPSREEMTKNQVSLTCLVKGFYPSDIAVEWESNGQPENNYKTTPPVLDSDGSFFLYSKLTVDKSRWQQGNVFSCSVMHEALHNHYTQKSLSLSPGKGGGGSGGGGSGGGGSGGGGSGGGGSGGGGSDKTHTCPPCPAPELLGGPSVFLFPPKPKDTLMISRTPEVTCVVVDVSHEDPEVKFNWYVDGVEVHNAKTKPCEEQYGSTYRCVSVLTVLHQDWLNGKEYKCKVSNKALPAPIEKTISKAKGQPREPQVYTLPPSREEMTKNQVSLTCLVKGFYPSDIAVEWESNGQPENNYKTTPPVLDSDGSFFLYSKLTVDKSRWQQGNVFSCSVMHEALHNHYTQKSLSLSPGK

SEQ ID NO: 872 - protein, 5 aa, Artificial Sequence
  Synthetic peptide
SYAMS

SEQ ID NO: 873 - protein, 17 aa, Artificial Sequence
  Synthetic peptide
AISGSGGRTFYAESVEG

SEQ ID NO: 874 - protein, 11 aa, Artificial Sequence
  Synthetic peptide
HDYSNYPYFDY

SEQ ID NO: 875 - protein, 12 aa, Artificial Sequence
  Synthetic peptide
RASQSIRSNYLA

SEQ ID NO: 876 - protein, 7 aa, Artificial Sequence
  Synthetic peptide
GASSRAT

SEQ ID NO: 877 - protein, 9 aa, Artificial Sequence
  Synthetic peptide
QQYGSSPPS

SEQ ID NO: 878 - protein, 120 aa, Artificial Sequence
  Synthetic peptide
EVQLLESGGGVVQPGRSLRLSCAASGFTFSSYAMSWVRQAPGKCLEWVSAISGSGGRTFYAESVEGRFTISRDNSKNTLYLQMNSLRAEDTAVYYCAKHDYSNYPYFDYWGQGTLVTVSS

SEQ ID NO: 879 - protein, 108 aa, Artificial Sequence
  Synthetic peptide
EIVLTQSPGTLSLSPGERATLSCRASQSIRSNYLAWYQQKPGQAPRLLIYGASSRATGIPDRFSGSGSGTDFTLTISRLEPEDFAVYYCQQYGSSPPSFGCGTKVEIK

SEQ ID NO: 880 - protein, 243 aa, Artificial Sequence
  Synthetic peptide
EVQLLESGGGVVQPGRSLRLSCAASGFTFSSYAMSWVRQAPGKCLEWVSAISGSGGRTFYAESVEGRFTISRDNSKNTLYLQMNSLRAEDTAVYYCAKHDYSNYPYFDYWGQGTLVTVSSGGGGSGGGGSGGGGSEIVLTQSPGTLSLSPGERATLSCRASQSIRSNYLAWYQQKPGQAPRLLIYGASSRATGIPDRFSGSGSGTDFTLTISRLEPEDFAVYYCQQYGSSPPSFGCGTKVEIK

SEQ ID NO: 881 - protein, 498 aa, Artificial Sequence
  Synthetic peptide
EVQLLESGGGVVQPGRSLRLSCAASGFTFSSYAMSWVRQAPGKCLEWVSAISGSGGRTFYAESVEGRFTISRDNSKNTLYLQMNSLRAEDTAVYYCAKHDYSNYPYFDYWGQGTLVTVSSGGGGSGGGGSGGGGSEIVLTQSPGTLSLSPGERATLSCRASQSIRSNYLAWYQQKPGQAPRLLIYGASSRATGIPDRFSGSGSGTDFTLTISRLEPEDFAVYYCQQYGSSPPSFGCGTKVEIKSGGGGSEVQLVESGGGLVQPGGSLKLSCAASGFTFNKYAMNWVRQAPGKGLEWVARIRSKYNNYATYYADSVKDRFTISRDDSKNTAYLQMNNLKTEDTAVYYCVRHGNFGNSYISYWAYWGQGTLVTVSSGGGGSGGGGSGGGGSQTVVTQEPSLTVSPGGTVTLTCGSSTGAVTSGNYPNWVQQKPGQAPRGLIGGTKFLAPGTPARFSGSLLGGKAALTLSGVQPEDEAEYYCVLWYSNRWVFGGGTKLTVL

SEQ ID NO: 882 - protein, 986 aa, Artificial Sequence
  Synthetic peptide
EVQLLESGGGVVQPGRSLRLSCAASGFTFSSYAMSWVRQAPGKCLEWVSAISGSGGRTFYAESVEGRFTISRDNSKNTLYLQMNSLRAEDTAVYYCAKHDYSNYPYFDYWGQGTLVTVSSGGGGSGGGGSGGGGSEIVLTQSPGTLSLSPGERATLSCRASQSIRSNYLAWYQQKPGQAPRLLIYGASSRATGIPDRFSGSGSGTDFTLTISRLEPEDFAVYYCQQYGSSPPSFGCGTKVEIKSGGGGSEVQLVESGGGLVQPGGSLKLSCAASGFTFNKYAMNWVRQAPGKGLEWVARIRSKYNNYATYYADSVKDRFTISRDDSKNTAYLQMNNLKTEDTAVYYCVRHGNFGNSYISYWAYWGQGTLVTVSSGGGGSGGGGSGGGGSQTVVTQEPSLTVSPGGTVTLTCGSSTGAVTSGNYPNWVQQKPGQAPRGLIGGTKFLAPGTPARFSGSLLGGKAALTLSGVQPEDEAEYYCVLWYSNRWVFGGGTKLTVLGGGGDKTHTCPPCPAPELLGGPSVFLFPPKPKDTLMISRTPEVTCVVVDVSHEDPEVKFNWYVDGVEVHNAKTKPCEEQYGSTYRCVSVLTVLHQDWLNGKEYKCKVSNKALPAPIEKTISKAKGQPREPQVYTLPPSREEMTKNQVSLTCLVKGFYPSDIAVEWESNGQPENNYKTTPPVLDSDGSFFLYSKLTVDKSRWQQGNVFSCSVMHEALHNHYTQKSLSLSPGKGGGGSGGGGSGGGGSGGGGSGGGGSGGGGSDKTHTCPPCPAPELLGGPSVFLFPPKPKDTLMISRTPEVTCVVVDVSHEDPEVKFNWYVDGVEVHNAKTKPCEEQYGSTYRCVSVLTVLHQDWLNGKEYKCKVSNKALPAPIEKTISKAKGQPREPQVYTLPPSREEMTKNQVSLTCLVKGFYPSDIAVEWESNGQPENNYKTTPPVLDSDGSFFLYSKLTVDKSRWQQGNVFSCSVMHEALHNHYTQKSLSLSPGK

SEQ ID NO: 883 - protein, 120 aa, Artificial Sequence
  Synthetic peptide
EVQLLESGGGVVQPGRSLRLSCAASGFTFSSYAMSWVRQAPGKGLEWVSAISGSGGRTFYAESVEGRFTISRDNSKNTLYLQMNSLRAEDTAVYYCAKHDYSNYPYFDYWGQGTLVTVSS

SEQ ID NO: 884 - protein, 108 aa, Artificial Sequence
  Synthetic peptide
EIVLTQSPGTLSLSPGERATLSCRASQSIRSNYLAWYQQKPGQAPRLLIYGASSRATGIPDRFSGSGSGTDFTLTISRLEPEDFAVYYCQQYGSSPPSFGQGTKVEIK

SEQ ID NO: 885 - protein, 243 aa, Artificial Sequence
  Synthetic peptide
EVQLLESGGGVVQPGRSLRLSCAASGFTFSSYAMSWVRQAPGKGLEWVSAISGSGGRTFYAESVEGRFTISRDNSKNTLYLQMNSLRAEDTAVYYCAKHDYSNYPYFDYWGQGTLVTVSSGGGGSGGGGSGGGGSEIVLTQSPGTLSLSPGERATLSCRASQSIRSNYLAWYQQKPGQAPRLLIYGASSRATGIPDRFSGSGSGTDFTLTISRLEPEDFAVYYCQQYGSSPPSFGQGTKVEIK

SEQ ID NO: 886 - protein, 498 aa, Artificial Sequence
  Synthetic peptide
EVQLLESGGGVVQPGRSLRLSCAASGFTFSSYAMSWVRQAPGKGLEWVSAISGSGGRTFYAESVEGRFTISRDNSKNTLYLQMNSLRAEDTAVYYCAKHDYSNYPYFDYWGQGTLVTVSSGGGGSGGGGSGGGGSEIVLTQSPGTLSLSPGERATLSCRASQSIRSNYLAWYQQKPGQAPRLLIYGASSRATGIPDRFSGSGSGTDFTLTISRLEPEDFAVYYCQQYGSSPPSFGQGTKVEIKSGGGGSEVQLVESGGGLVQPGGSLKLSCAASGFTFNKYAMNWVRQAPGKGLEWVARIRSKYNNYATYYADSVKDRFTISRDDSKNTAYLQMNNLKTEDTAVYYCVRHGNFGNSYISYWAYWGQGTLVTVSSGGGGSGGGGSGGGGSQTVVTQEPSLTVSPGGTVTLTCGSSTGAVTSGNYPNWVQQKPGQAPRGLIGGTKFLAPGTPARFSGSLLGGKAALTLSGVQPEDEAEYYCVLWYSNRWVFGGGTKLTVL

SEQ ID NO: 887 - protein, 986 aa, Artificial Sequence
  Synthetic peptide
EVQLLESGGGVVQPGRSLRLSCAASGFTFSSYAMSWVRQAPGKGLEWVSAISGSGGRTFYAESVEGRFTISRDNSKNTLYLQMNSLRAEDTAVYYCAKHDYSNYPYFDYWGQGTLVTVSSGGGGSGGGGSGGGGSEIVLTQSPGTLSLSPGERATLSCRASQSIRSNYLAWYQQKPGQAPRLLIYGASSRATGIPDRFSGSGSGTDFTLTISRLEPEDFAVYYCQQYGSSPPSFGQGTKVEIKSGGGGSEVQLVESGGGLVQPGGSLKLSCAASGFTFNKYAMNWVRQAPGKGLEWVARIRSKYNNYATYYADSVKDRFTISRDDSKNTAYLQMNNLKTEDTAVYYCVRHGNFGNSYISYWAYWGQGTLVTVSSGGGGSGGGGSGGGGSQTVVTQEPSLTVSPGGTVTLTCGSSTGAVTSGNYPNWVQQKPGQAPRGLIGGTKFLAPGTPARFSGSLLGGKAALTLSGVQPEDEAEYYCVLWYSNRWVFGGGTKLTVLGGGGDKTHTCPPCPAPELLGGPSVFLFPPKPKDTLMISRTPEVTCVVVDVSHEDPEVKFNWYVDGVEVHNAKTKPCEEQYGSTYRCVSVLTVLHQDWLNGKEYKCKVSNKALPAPIEKTISKAKGQPREPQVYTLPPSREEMTKNQVSLTCLVKGFYPSDIAVEWESNGQPENNYKTTPPVLDSDGSFFLYSKLTVDKSRWQQGNVFSCSVMHEALHNHYTQKSLSLSPGKGGGGSGGGGSGGGGSGGGGSGGGGSGGGGSDKTHTCPPCPAPELLGGPSVFLFPPKPKDTLMISRTPEVTCVVVDVSHEDPEVKFNWYVDGVEVHNAKTKPCEEQYGSTYRCVSVLTVLHQDWLNGKEYKCKVSNKALPAPIEKTISKAKGQPREPQVYTLPPSREEMTKNQVSLTCLVKGFYPSDIAVEWESNGQPENNYKTTPPVLDSDGSFFLYSKLTVDKSRWQQGNVFSCSVMHEALHNHYTQKSLSLSPGK

SEQ ID NO: 888 - protein, 5 aa, Artificial Sequence
  Synthetic peptide
SYAMS

SEQ ID NO: 889 - protein, 17 aa, Artificial Sequence
  Synthetic peptide
AISGSGGGTFYAESVEG

SEQ ID NO: 890 - protein, 11 aa, Artificial Sequence
  Synthetic peptide
HDYSNYPYFDY

SEQ ID NO: 891 - protein, 12 aa, Artificial Sequence
  Synthetic peptide
RASQSVRSSYLA

SEQ ID NO: 892 - protein, 7 aa, Artificial Sequence
  Synthetic peptide
GASSRAT

SEQ ID NO: 893 - protein, 9 aa, Artificial Sequence
  Synthetic peptide
QQYGDLPFT

SEQ ID NO: 894 - protein, 120 aa, Artificial Sequence
  Synthetic peptide
EVQLLESGGGVVQPGRSLRLSCAASGFTFSSYAMSWVRQAPGKCLEWVSAISGSGGGTFYAESVEGRFTISRDNSKNTLYLQMNSLRAEDTAVYYCARHDYSNYPYFDYWGLGTLVTVSS

SEQ ID NO: 895 - protein, 108 aa, Artificial Sequence
  Synthetic peptide
EIVLTQSPGTLSLSPGERATLSCRASQSVRSSYLAWYQQKPGQAPRLLIYGASSRATGIPDRFSGSGSGTDFTLTISRLEPEDFAVYSCQQYGDLPFTFGCGTKVEIK

SEQ ID NO: 896 - protein, 243 aa, Artificial Sequence
  Synthetic peptide
EVQLLESGGGVVQPGRSLRLSCAASGFTFSSYAMSWVRQAPGKCLEWVSAISGSGGGTFYAESVEGRFTISRDNSKNTLYLQMNSLRAEDTAVYYCARHDYSNYPYFDYWGLGTLVTVSSGGGGSGGGGSGGGGSEIVLTQSPGTLSLSPGERATLSCRASQSVRSSYLAWYQQKPGQAPRLLIYGASSRATGIPDRFSGSGSGTDFTLTISRLEPEDFAVYSCQQYGDLPFTFGCGTKVEIK

SEQ ID NO: 897 - protein, 498 aa, Artificial Sequence
  Synthetic peptide
EVQLLESGGGVVQPGRSLRLSCAASGFTFSSYAMSWVRQAPGKCLEWVSAISGSGGGTFYAESVEGRFTISRDNSKNTLYLQMNSLRAEDTAVYYCARHDYSNYPYFDYWGLGTLVTVSSGGGGSGGGGSGGGGSEIVLTQSPGTLSLSPGERATLSCRASQSVRSSYLAWYQQKPGQAPRLLIYGASSRATGIPDRFSGSGSGTDFTLTISRLEPEDFAVYSCQQYGDLPFTFGCGTKVEIKSGGGGSEVQLVESGGGLVQPGGSLKLSCAASGFTFNKYAMNWVRQAPGKGLEWVARIRSKYNNYATYYADSVKDRFTISRDDSKNTAYLQMNNLKTEDTAVYYCVRHGNFGNSYISYWAYWGQGTLVTVSSGGGGSGGGGSGGGGSQTVVTQEPSLTVSPGGTVTLTCGSSTGAVTSGNYPNWVQQKPGQAPRGLIGGTKFLAPGTPARFSGSLLGGKAALTLSGVQPEDEAEYYCVLWYSNRWVFGGGTKLTVL

SEQ ID NO: 898 - protein, 986 aa, Artificial Sequence
  Synthetic peptide
EVQLLESGGGVVQPGRSLRLSCAASGFTFSSYAMSWVRQAPGKCLEWVSAISGSGGGTFYAESVEGRFTISRDNSKNTLYLQMNSLRAEDTAVYYCARHDYSNYPYFDYWGLGTLVTVSSGGGGSGGGGSGGGGSEIVLTQSPGTLSLSPGERATLSCRASQSVRSSYLAWYQQKPGQAPRLLIYGASSRATGIPDRFSGSGSGTDFTLTISRLEPEDFAVYSCQQYGDLPFTFGCGTKVEIKSGGGGSEVQLVESGGGLVQPGGSLKLSCAASGFTFNKYAMNWVRQAPGKGLEWVARIRSKYNNYATYYADSVKDRFTISRDDSKNTAYLQMNNLKTEDTAVYYCVRHGNFGNSYISYWAYWGQGTLVTVSSGGGGSGGGGSGGGGSQTVVTQEPSLTVSPGGTVTLTCGSSTGAVTSGNYPNWVQQKPGQAPRGLIGGTKFLAPGTPARFSGSLLGGKAALTLSGVQPEDEAEYYCVLWYSNRWVFGGGTKLTVLGGGGDKTHTCPPCPAPELLGGPSVFLFPPKPKDTLMISRTPEVTCVVVDVSHEDPEVKFNWYVDGVEVHNAKTKPCEEQYGSTYRCVSVLTVLHQDWLNGKEYKCKVSNKALPAPIEKTISKAKGQPREPQVYTLPPSREEMTKNQVSLTCLVKGFYPSDIAVEWESNGQPENNYKTTPPVLDSDGSFFLYSKLTVDKSRWQQGNVFSCSVMHEALHNHYTQKSLSLSPGKGGGGSGGGGSGGGGSGGGGSGGGGSGGGGSDKTHTCPPCPAPELLGGPSVFLFPPKPKDTLMISRTPEVTCVVVDVSHEDPEVKFNWYVDGVEVHNAKTKPCEEQYGSTYRCVSVLTVLHQDWLNGKEYKCKVSNKALPAPIEKTISKAKGQPREPQVYTLPPSREEMTKNQVSLTCLVKGFYPSDIAVEWESNGQPENNYKTTPPVLDSDGSFFLYSKLTVDKSRWQQGNVFSCSVMHEALHNHYTQKSLSLSPGK

SEQ ID NO: 899 - protein, 120 aa, Artificial Sequence
  Synthetic peptide
EVQLLESGGGVVQPGRSLRLSCAASGFTFSSYAMSWVRQAPGKGLEWVSAISGSGGGTFYAESVEGRFTISRDNSKNTLYLQMNSLRAEDTAVYYCARHDYSNYPYFDYWGLGTLVTVSS

SEQ ID NO: 900 - protein, 108 aa, Artificial Sequence
  Synthetic peptide
EIVLTQSPGTLSLSPGERATLSCRASQSVRSSYLAWYQQKPGQAPRLLIYGASSRATGIPDRFSGSGSGTDFTLTISRLEPEDFAVYSCQQYGDLPFTFGPGTKVEIK

SEQ ID NO: 901 - protein, 243 aa, Artificial Sequence
  Synthetic peptide
EVQLLESGGGVVQPGRSLRLSCAASGFTFSSYAMSWVRQAPGKGLEWVSAISGSGGGTFYAESVEGRFTISRDNSKNTLYLQMNSLRAEDTAVYYCARHDYSNYPYFDYWGLGTLVTVSSGGGGSGGGGSGGGGSEIVLTQSPGTLSLSPGERATLSCRASQSVRSSYLAWYQQKPGQAPRLLIYGASSRATGIPDRFSGSGSGTDFTLTISRLEPEDFAVYSCQQYGDLPFTFGPGTKVEIK

SEQ ID NO: 902 - protein, 498 aa, Artificial Sequence
  Synthetic peptide
EVQLLESGGGVVQPGRSLRLSCAASGFTFSSYAMSWVRQAPGKGLEWVSAISGSGGGTFYAESVEGRFTISRDNSKNTLYLQMNSLRAEDTAVYYCARHDYSNYPYFDYWGLGTLVTVSSGGGGSGGGGSGGGGSEIVLTQSPGTLSLSPGERATLSCRASQSVRSSYLAWYQQKPGQAPRLLIYGASSRATGIPDRFSGSGSGTDFTLTISRLEPEDFAVYSCQQYGDLPFTFGPGTKVEIKSGGGGSEVQLVESGGGLVQPGGSLKLSCAASGFTFNKYAMNWVRQAPGKGLEWVARIRSKYNNYATYYADSVKDRFTISRDDSKNTAYLQMNNLKTEDTAVYYCVRHGNFGNSYISYWAYWGQGTLVTVSSGGGGSGGGGSGGGGSQTVVTQEPSLTVSPGGTVTLTCGSSTGAVTSGNYPNWVQQKPGQAPRGLIGGTKFLAPGTPARFSGSLLGGKAALTLSGVQPEDEAEYYCVLWYSNRWVFGGGTKLTVL

SEQ ID NO: 903 - protein, 986 aa, Artificial Sequence
  Synthetic peptide
EVQLLESGGGVVQPGRSLRLSCAASGFTFSSYAMSWVRQAPGKGLEWVSAISGSGGGTFYAESVEGRFTISRDNSKNTLYLQMNSLRAEDTAVYYCARHDYSNYPYFDYWGLGTLVTVSSGGGGSGGGGSGGGGSEIVLTQSPGTLSLSPGERATLSCRASQSVRSSYLAWYQQKPGQAPRLLIYGASSRATGIPDRFSGSGSGTDFTLTISRLEPEDFAVYSCQQYGDLPFTFGPGTKVEIKSGGGGSEVQLVESGGGLVQPGGSLKLSCAASGFTFNKYAMNWVRQAPGKGLEWVARIRSKYNNYATYYADSVKDRFTISRDDSKNTAYLQMNNLKTEDTAVYYCVRHGNFGNSYISYWAYWGQGTLVTVSSGGGGSGGGGSGGGGSQTVVTQEPSLTVSPGGTVTLTCGSSTGAVTSGNYPNWVQQKPGQAPRGLIGGTKFLAPGTPARFSGSLLGGKAALTLSGVQPEDEAEYYCVLWYSNRWVFGGGTKLTVLGGGGDKTHTCPPCPAPELLGGPSVFLFPPKPKDTLMISRTPEVTCVVVDVSHEDPEVKFNWYVDGVEVHNAKTKPCEEQYGSTYRCVSVLTVLHQDWLNGKEYKCKVSNKALPAPIEKTISKAKGQPREPQVYTLPPSREEMTKNQVSLTCLVKGFYPSDIAVEWESNGQPENNYKTTPPVLDSDGSFFLYSKLTVDKSRWQQGNVFSCSVMHEALHNHYTQKSLSLSPGKGGGGSGGGGSGGGGSGGGGSGGGGSGGGGSDKTHTCPPCPAPELLGGPSVFLFPPKPKDTLMISRTPEVTCVVVDVSHEDPEVKFNWYVDGVEVHNAKTKPCEEQYGSTYRCVSVLTVLHQDWLNGKEYKCKVSNKALPAPIEKTISKAKGQPREPQVYTLPPSREEMTKNQVSLTCLVKGFYPSDIAVEWESNGQPENNYKTTPPVLDSDGSFFLYSKLTVDKSRWQQGNVFSCSVMHEALHNHYTQKSLSLSPGK

SEQ ID NO: 904 - protein, 5 aa, Artificial Sequence
  Synthetic peptide
SYAMS

SEQ ID NO: 905 - protein, 17 aa, Artificial Sequence
  Synthetic peptide
AISGSGGRTFYAESVEG

SEQ ID NO: 906 - protein, 11 aa, Artificial Sequence
  Synthetic peptide
HDYSNYPYFDY

SEQ ID NO: 907 - protein, 12 aa, Artificial Sequence
  Synthetic peptide
RASQSVRSSYLA

SEQ ID NO: 908 - protein, 7 aa, Artificial Sequence
  Synthetic peptide
GASSRAT

SEQ ID NO: 909 - protein, 9 aa, Artificial Sequence
  Synthetic peptide
QQYGDLPFT

SEQ ID NO: 910 - protein, 120 aa, Artificial Sequence; identical to SEQ ID NO: 846
  Synthetic peptide

SEQ ID NO: 911 - protein, 108 aa, Artificial Sequence
  Synthetic peptide
EIVLTQSPGTLSLSPGERATLSCRASQSVRSSYLAWYQQKPGQAPRLLIYGASSRATGIPDRFSGSGSGTDFTLTISRLEPEDFAVYYCQQYGDLPFTFGCGTKVDIK

SEQ ID NO: 912 - protein, 243 aa, Artificial Sequence
  Synthetic peptide
EVQLLESGGGMVQPGGSLRLSCAASGFTFSSYAMSWVRQAPGKCLEWVSAISGSGGRTFYAESVEGRFTISRDNSKNTLYLQMNSLRAEDTAVYYCTKHDYSNYPYFDYWGQGTLVTVSSGGGGSGGGGSGGGGSEIVLTQSPGTLSLSPGERATLSCRASQSVRSSYLAWYQQKPGQAPRLLIYGASSRATGIPDRFSGSGSGTDFTLTISRLEPEDFAVYYCQQYGDLPFTFGCGTKVDIK

SEQ ID NO: 913 - protein, 498 aa, Artificial Sequence
  Synthetic peptide
EVQLLESGGGMVQPGGSLRLSCAASGFTFSSYAMSWVRQAPGKCLEWVSAISGSGGRTFYAESVEGRFTISRDNSKNTLYLQMNSLRAEDTAVYYCTKHDYSNYPYFDYWGQGTLVTVSSGGGGSGGGGSGGGGSEIVLTQSPGTLSLSPGERATLSCRASQSVRSSYLAWYQQKPGQAPRLLIYGASSRATGIPDRFSGSGSGTDFTLTISRLEPEDFAVYYCQQYGDLPFTFGCGTKVDIKSGGGGSEVQLVESGGGLVQPGGSLKLSCAASGFTFNKYAMNWVRQAPGKGLEWVARIRSKYNNYATYYADSVKDRFTISRDDSKNTAYLQMNNLKTEDTAVYYCVRHGNFGNSYISYWAYWGQGTLVTVSSGGGGSGGGGSGGGGSQTVVTQEPSLTVSPGGTVTLTCGSSTGAVTSGNYPNWVQQKPGQAPRGLIGGTKFLAPGTPARFSGSLLGGKAALTLSGVQPEDEAEYYCVLWYSNRWVFGGGTKLTVL

SEQ ID NO: 914 - protein, 986 aa, Artificial Sequence
  Synthetic peptide
EVQLLESGGGMVQPGGSLRLSCAASGFTFSSYAMSWVRQAPGKCLEWVSAISGSGGRTFYAESVEGRFTISRDNSKNTLYLQMNSLRAEDTAVYYCTKHDYSNYPYFDYWGQGTLVTVSSGGGGSGGGGSGGGGSEIVLTQSPGTLSLSPGERATLSCRASQSVRSSYLAWYQQKPGQAPRLLIYGASSRATGIPDRFSGSGSGTDFTLTISRLEPEDFAVYYCQQYGDLPFTFGCGTKVDIKSGGGGSEVQLVESGGGLVQPGGSLKLSCAASGFTFNKYAMNWVRQAPGKGLEWVARIRSKYNNYATYYADSVKDRFTISRDDSKNTAYLQMNNLKTEDTAVYYCVRHGNFGNSYISYWAYWGQGTLVTVSSGGGGSGGGGSGGGGSQTVVTQEPSLTVSPGGTVTLTCGSSTGAVTSGNYPNWVQQKPGQAPRGLIGGTKFLAPGTPARFSGSLLGGKAALTLSGVQPEDEAEYYCVLWYSNRWVFGGGTKLTVLGGGGDKTHTCPPCPAPELLGGPSVFLFPPKPKDTLMISRTPEVTCVVVDVSHEDPEVKFNWYVDGVEVHNAKTKPCEEQYGSTYRCVSVLTVLHQDWLNGKEYKCKVSNKALPAPIEKTISKAKGQPREPQVYTLPPSREEMTKNQVSLTCLVKGFYPSDIAVEWESNGQPENNYKTTPPVLDSDGSFFLYSKLTVDKSRWQQGNVFSCSVMHEALHNHYTQKSLSLSPGKGGGGSGGGGSGGGGSGGGGSGGGGSGGGGSDKTHTCPPCPAPELLGGPSVFLFPPKPKDTLMISRTPEVTCVVVDVSHEDPEVKFNWYVDGVEVHNAKTKPCEEQYGSTYRCVSVLTVLHQDWLNGKEYKCKVSNKALPAPIEKTISKAKGQPREPQVYTLPPSREEMTKNQVSLTCLVKGFYPSDIAVEWESNGQPENNYKTTPPVLDSDGSFFLYSKLTVDKSRWQQGNVFSCSVMHEALHNHYTQKSLSLSPGK

SEQ ID NO: 915 - protein, 120 aa, Artificial Sequence; identical to SEQ ID NO: 851
  Synthetic peptide

SEQ ID NO: 916 - protein, 108 aa, Artificial Sequence
  Synthetic peptide
EIVLTQSPGTLSLSPGERATLSCRASQSVRSSYLAWYQQKPGQAPRLLIYGASSRATGIPDRFSGSGSGTDFTLTISRLEPEDFAVYYCQQYGDLPFTFGPGTKVDIK

SEQ ID NO: 917 - protein, 243 aa, Artificial Sequence
  Synthetic peptide
EVQLLESGGGMVQPGGSLRLSCAASGFTFSSYAMSWVRQAPGKGLEWVSAISGSGGRTFYAESVEGRFTISRDNSKNTLYLQMNSLRAEDTAVYYCTKHDYSNYPYFDYWGQGTLVTVSSGGGGSGGGGSGGGGSEIVLTQSPGTLSLSPGERATLSCRASQSVRSSYLAWYQQKPGQAPRLLIYGASSRATGIPDRFSGSGSGTDFTLTISRLEPEDFAVYYCQQYGDLPFTFGPGTKVDIK

SEQ ID NO: 918 - protein, 498 aa, Artificial Sequence
  Synthetic peptide
EVQLLESGGGMVQPGGSLRLSCAASGFTFSSYAMSWVRQAPGKGLEWVSAISGSGGRTFYAESVEGRFTISRDNSKNTLYLQMNSLRAEDTAVYYCTKHDYSNYPYFDYWGQGTLVTVSSGGGGSGGGGSGGGGSEIVLTQSPGTLSLSPGERATLSCRASQSVRSSYLAWYQQKPGQAPRLLIYGASSRATGIPDRFSGSGSGTDFTLTISRLEPEDFAVYYCQQYGDLPFTFGPGTKVDIKSGGGGSEVQLVESGGGLVQPGGSLKLSCAASGFTFNKYAMNWVRQAPGKGLEWVARIRSKYNNYATYYADSVKDRFTISRDDSKNTAYLQMNNLKTEDTAVYYCVRHGNFGNSYISYWAYWGQGTLVTVSSGGGGSGGGGSGGGGSQTVVTQEPSLTVSPGGTVTLTCGSSTGAVTSGNYPNWVQQKPGQAPRGLIGGTKFLAPGTPARFSGSLLGGKAALTLSGVQPEDEAEYYCVLWYSNRWVFGGGTKLTVL

SEQ ID NO: 919 - protein, 986 aa, Artificial Sequence
  Synthetic peptide
EVQLLESGGGMVQPGGSLRLSCAASGFTFSSYAMSWVRQAPGKGLEWVSAISGSGGRTFYAESVEGRFTISRDNSKNTLYLQMNSLRAEDTAVYYCTKHDYSNYPYFDYWGQGTLVTVSSGGGGSGGGGSGGGGSEIVLTQSPGTLSLSPGERATLSCRASQSVRSSYLAWYQQKPGQAPRLLIYGASSRATGIPDRFSGSGSGTDFTLTISRLEPEDFAVYYCQQYGDLPFTFGPGTKVDIKSGGGGSEVQLVESGGGLVQPGGSLKLSCAASGFTFNKYAMNWVRQAPGKGLEWVARIRSKYNNYATYYADSVKDRFTISRDDSKNTAYLQMNNLKTEDTAVYYCVRHGNFGNSYISYWAYWGQGTLVTVSSGGGGSGGGGSGGGGSQTVVTQEPSLTVSPGGTVTLTCGSSTGAVTSGNYPNWVQQKPGQAPRGLIGGTKFLAPGTPARFSGSLLGGKAALTLSGVQPEDEAEYYCVLWYSNRWVFGGGTKLTVLGGGGDKTHTCPPCPAPELLGGPSVFLFPPKPKDTLMISRTPEVTCVVVDVSHEDPEVKFNWYVDGVEVHNAKTKPCEEQYGSTYRCVSVLTVLHQDWLNGKEYKCKVSNKALPAPIEKTISKAKGQPREPQVYTLPPSREEMTKNQVSLTCLVKGFYPSDIAVEWESNGQPENNYKTTPPVLDSDGSFFLYSKLTVDKSRWQQGNVFSCSVMHEALHNHYTQKSLSLSPGKGGGGSGGGGSGGGGSGGGGSGGGGSGGGGSDKTHTCPPCPAPELLGGPSVFLFPPKPKDTLMISRTPEVTCVVVDVSHEDPEVKFNWYVDGVEVHNAKTKPCEEQYGSTYRCVSVLTVLHQDWLNGKEYKCKVSNKALPAPIEKTISKAKGQPREPQVYTLPPSREEMTKNQVSLTCLVKGFYPSDIAVEWESNGQPENNYKTTPPVLDSDGSFFLYSKLTVDKSRWQQGNVFSCSVMHEALHNHYTQKSLSLSPGK

SEQ ID NO: 920 - protein, 5 aa, Artificial Sequence
  Synthetic peptide
TYAMS

SEQ ID NO: 921 - protein, 17 aa, Artificial Sequence
  Synthetic peptide
LISGSGGRTYYAESVKG

SEQ ID NO: 922 - protein, 11 aa, Artificial Sequence
  Synthetic peptide
HDYSNYPYFDY

SEQ ID NO: 923 - protein, 12 aa, Artificial Sequence
  Synthetic peptide
RASQGVRSSYLA

SEQ ID NO: 924 - protein, 7 aa, Artificial Sequence
  Synthetic peptide
GASSRAT

SEQ ID NO: 925 - protein, 9 aa, Artificial Sequence
  Synthetic peptide
QQYGSSPPT

SEQ ID NO: 926 - protein, 120 aa, Artificial Sequence; identical to SEQ ID NO: 814
  Synthetic peptide

SEQ ID NO: 927 - protein, 108 aa, Artificial Sequence
  Synthetic peptide
EIVLTQSPGTLSLSPGERATLSCRASQGVRSSYLAWYQQKPGQAPRLLIYGASSRATGIPDRFSGSGSGTDFTLTINRLEPEDFAVYYCQQYGSSPPTFGCGTKVDIK

SEQ ID NO: 928 - protein, 243 aa, Artificial Sequence
  Synthetic peptide
EVQLLESGGGLVQPGGSLRLSCAASGFTFSTYAMSWVRQAPGKCLEWVSLISGSGGRTYYAESVKGRFTISRDNSKNTLYLQMNSLRAEDTAVYYCAKHDYSNYPYFDYWGQGTLVTVSSGGGGSGGGGSGGGGSEIVLTQSPGTLSLSPGERATLSCRASQGVRSSYLAWYQQKPGQAPRLLIYGASSRATGIPDRFSGSGSGTDFTLTINRLEPEDFAVYYCQQYGSSPPTFGCGTKVDIK

SEQ ID NO: 929 - protein, 498 aa, Artificial Sequence
  Synthetic peptide
EVQLLESGGGLVQPGGSLRLSCAASGFTFSTYAMSWVRQAPGKCLEWVSLISGSGGRTYYAESVKGRFTISRDNSKNTLYLQMNSLRAEDTAVYYCAKHDYSNYPYFDYWGQGTLVTVSSGGGGSGGGGSGGGGSEIVLTQSPGTLSLSPGERATLSCRASQGVRSSYLAWYQQKPGQAPRLLIYGASSRATGIPDRFSGSGSGTDFTLTINRLEPEDFAVYYCQQYGSSPPTFGCGTKVDIKSGGGGSEVQLVESGGGLVQPGGSLKLSCAASGFTFNKYAMNWVRQAPGKGLEWVARIRSKYNNYATYYADSVKDRFTISRDDSKNTAYLQMNNLKTEDTAVYYCVRHGNFGNSYISYWAYWGQGTLVTVSSGGGGSGGGGSGGGGSQTVVTQEPSLTVSPGGTVTLTCGSSTGAVTSGNYPNWVQQKPGQAPRGLIGGTKFLAPGTPARFSGSLLGGKAALTLSGVQPEDEAEYYCVLWYSNRWVFGGGTKLTVL

SEQ ID NO: 930 - protein, 986 aa, Artificial Sequence
  Synthetic peptide
EVQLLESGGGLVQPGGSLRLSCAASGFTFSTYAMSWVRQAPGKCLEWVSLISGSGGRTYYAESVKGRFTISRDNSKNTLYLQMNSLRAEDTAVYYCAKHDYSNYPYFDYWGQGTLVTVSSGGGGSGGGGSGGGGSEIVLTQSPGTLSLSPGERATLSCRASQGVRSSYLAWYQQKPGQAPRLLIYGASSRATGIPDRFSGSGSGTDFTLTINRLEPEDFAVYYCQQYGSSPPTFGCGTKVDIKSGGGGSEVQLVESGGGLVQPGGSLKLSCAASGFTFNKYAMNWVRQAPGKGLEWVARIRSKYNNYATYYADSVKDRFTISRDDSKNTAYLQMNNLKTEDTAVYYCVRHGNFGNSYISYWAYWGQGTLVTVSSGGGGSGGGGSGGGGSQTVVTQEPSLTVSPGGTVTLTCGSSTGAVTSGNYPNWVQQKPGQAPRGLIGGTKFLAPGTPARFSGSLLGGKAALTLSGVQPEDEAEYYCVLWYSNRWVFGGGTKLTVLGGGGDKTHTCPPCPAPELLGGPSVFLFPPKPKDTLMISRTPEVTCVVVDVSHEDPEVKFNWYVDGVEVHNAKTKPCEEQYGSTYRCVSVLTVLHQDWLNGKEYKCKVSNKALPAPIEKTISKAKGQPREPQVYTLPPSREEMTKNQVSLTCLVKGFYPSDIAVEWESNGQPENNYKTTPPVLDSDGSFFLYSKLTVDKSRWQQGNVFSCSVMHEALHNHYTQKSLSLSPGKGGGGSGGGGSGGGGSGGGGSGGGGSGGGGSDKTHTCPPCPAPELLGGPSVFLFPPKPKDTLMISRTPEVTCVVVDVSHEDPEVKFNWYVDGVEVHNAKTKPCEEQYGSTYRCVSVLTVLHQDWLNGKEYKCKVSNKALPAPIEKTISKAKGQPREPQVYTLPPSREEMTKNQVSLTCLVKGFYPSDIAVEWESNGQPENNYKTTPPVLDSDGSFFLYSKLTVDKSRWQQGNVFSCSVMHEALHNHYTQKSLSLSPGK

SEQ ID NO: 931 - protein, 120 aa, Artificial Sequence; identical to SEQ ID NO: 819
  Synthetic peptide

SEQ ID NO: 932 - protein, 108 aa, Artificial Sequence
  Synthetic peptide
EIVLTQSPGTLSLSPGERATLSCRASQGVRSSYLAWYQQKPGQAPRLLIYGASSRATGIPDRFSGSGSGTDFTLTINRLEPEDFAVYYCQQYGSSPPTFGGGTKVDIK

SEQ ID NO: 933 - protein, 243 aa, Artificial Sequence
  Synthetic peptide
EVQLLESGGGLVQPGGSLRLSCAASGFTFSTYAMSWVRQAPGKGLEWVSLISGSGGRTYYAESVKGRFTISRDNSKNTLYLQMNSLRAEDTAVYYCAKHDYSNYPYFDYWGQGTLVTVSSGGGGSGGGGSGGGGSEIVLTQSPGTLSLSPGERATLSCRASQGVRSSYLAWYQQKPGQAPRLLIYGASSRATGIPDRFSGSGSGTDFTLTINRLEPEDFAVYYCQQYGSSPPTFGGGTKVDIK

SEQ ID NO: 934 - protein, 498 aa, Artificial Sequence
  Synthetic peptide
EVQLLESGGGLVQPGGSLRLSCAASGFTFSTYAMSWVRQAPGKGLEWVSLISGSGGRTYYAESVKGRFTISRDNSKNTLYLQMNSLRAEDTAVYYCAKHDYSNYPYFDYWGQGTLVTVSSGGGGSGGGGSGGGGSEIVLTQSPGTLSLSPGERATLSCRASQGVRSSYLAWYQQKPGQAPRLLIYGASSRATGIPDRFSGSGSGTDFTLTINRLEPEDFAVYYCQQYGSSPPTFGGGTKVDIKSGGGGSEVQLVESGGGLVQPGGSLKLSCAASGFTFNKYAMNWVRQAPGKGLEWVARIRSKYNNYATYYADSVKDRFTISRDDSKNTAYLQMNNLKTEDTAVYYCVRHGNFGNSYISYWAYWGQGTLVTVSSGGGGSGGGGSGGGGSQTVVTQEPSLTVSPGGTVTLTCGSSTGAVTSGNYPNWVQQKPGQAPRGLIGGTKFLAPGTPARFSGSLLGGKAALTLSGVQPEDEAEYYCVLWYSNRWVFGGGTKLTVL

SEQ ID NO: 935 - protein, 986 aa, Artificial Sequence
  Synthetic peptide
EVQLLESGGGLVQPGGSLRLSCAASGFTFSTYAMSWVRQAPGKGLEWVSLISGSGGRTYYAESVKGRFTISRDNSKNTLYLQMNSLRAEDTAVYYCAKHDYSNYPYFDYWGQGTLVTVSSGGGGSGGGGSGGGGSEIVLTQSPGTLSLSPGERATLSCRASQGVRSSYLAWYQQKPGQAPRLLIYGASSRATGIPDRFSGSGSGTDFTLTINRLEPEDFAVYYCQQYGSSPPTFGGGTKVDIKSGGGGSEVQLVESGGGLVQPGGSLKLSCAASGFTFNKYAMNWVRQAPGKGLEWVARIRSKYNNYATYYADSVKDRFTISRDDSKNTAYLQMNNLKTEDTAVYYCVRHGNFGNSYISYWAYWGQGTLVTVSSGGGGSGGGGSGGGGSQTVVTQEPSLTVSPGGTVTLTCGSSTGAVTSGNYPNWVQQKPGQAPRGLIGGTKFLAPGTPARFSGSLLGGKAALTLSGVQPEDEAEYYCVLWYSNRWVFGGGTKLTVLGGGGDKTHTCPPCPAPELLGGPSVFLFPPKPKDTLMISRTPEVTCVVVDVSHEDPEVKFNWYVDGVEVHNAKTKPCEEQYGSTYRCVSVLTVLHQDWLNGKEYKCKVSNKALPAPIEKTISKAKGQPREPQVYTLPPSREEMTKNQVSLTCLVKGFYPSDIAVEWESNGQPENNYKTTPPVLDSDGSFFLYSKLTVDKSRWQQGNVFSCSVMHEALHNHYTQKSLSLSPGKGGGGSGGGGSGGGGSGGGGSGGGGSGGGGSDKTHTCPPCPAPELLGGPSVFLFPPKPKDTLMISRTPEVTCVVVDVSHEDPEVKFNWYVDGVEVHNAKTKPCEEQYGSTYRCVSVLTVLHQDWLNGKEYKCKVSNKALPAPIEKTISKAKGQPREPQVYTLPPSREEMTKNQVSLTCLVKGFYPSDIAVEWESNGQPENNYKTTPPVLDSDGSFFLYSKLTVDKSRWQQGNVFSCSVMHEALHNHYTQKSLSLSPGK

SEQ ID NO: 936 - protein, 5 aa, Artificial Sequence
  Synthetic peptide
SYAMS

SEQ ID NO: 937 - protein, 17 aa, Artificial Sequence
  Synthetic peptide
AISGSGGRTFYAESVEG

SEQ ID NO: 938 - protein, 11 aa, Artificial Sequence
  Synthetic peptide
HDYSNYPYFDY

SEQ ID NO: 939 - protein, 12 aa, Artificial Sequence
  Synthetic peptide
RASQSVRSNYLA

SEQ ID NO: 940 - protein, 7 aa, Artificial Sequence
  Synthetic peptide
GASSRAT

SEQ ID NO: 941 - protein, 9 aa, Artificial Sequence
  Synthetic peptide
QQYGSSPPT

SEQ ID NO: 942 - protein, 120 aa, Artificial Sequence; identical to SEQ ID NO: 878
  Synthetic peptide

SEQ ID NO: 943 - protein, 108 aa, Artificial Sequence
  Synthetic peptide
EIVLTQSPGTLSLSPGERATLSCRASQSVRSNYLAWYQQKPGQAPRLLIYGASSRATGIPDRFSGSGSGTDFTLTINRLEPEDFAVYYCQQYGSSPPTFGCGTKVDIK

SEQ ID NO: 944 - protein, 243 aa, Artificial Sequence
  Synthetic peptide
EVQLLESGGGVVQPGRSLRLSCAASGFTFSSYAMSWVRQAPGKCLEWVSAISGSGGRTFYAESVEGRFTISRDNSKNTLYLQMNSLRAEDTAVYYCAKHDYSNYPYFDYWGQGTLVTVSSGGGGSGGGGSGGGGSEIVLTQSPGTLSLSPGERATLSCRASQSVRSNYLAWYQQKPGQAPRLLIYGASSRATGIPDRFSGSGSGTDFTLTINRLEPEDFAVYYCQQYGSSPPTFGCGTKVDIK

SEQ ID NO: 945 - protein, 498 aa, Artificial Sequence
  Synthetic peptide
EVQLLESGGGVVQPGRSLRLSCAASGFTFSSYAMSWVRQAPGKCLEWVSAISGSGGRTFYAESVEGRFTISRDNSKNTLYLQMNSLRAEDTAVYYCAKHDYSNYPYFDYWGQGTLVTVSSGGGGSGGGGSGGGGSEIVLTQSPGTLSLSPGERATLSCRASQSVRSNYLAWYQQKPGQAPRLLIYGASSRATGIPDRFSGSGSGTDFTLTINRLEPEDFAVYYCQQYGSSPPTFGCGTKVDIKSGGGGSEVQLVESGGGLVQPGGSLKLSCAASGFTFNKYAMNWVRQAPGKGLEWVARIRSKYNNYATYYADSVKDRFTISRDDSKNTAYLQMNNLKTEDTAVYYCVRHGNFGNSYISYWAYWGQGTLVTVSSGGGGSGGGGSGGGGSQTVVTQEPSLTVSPGGTVTLTCGSSTGAVTSGNYPNWVQQKPGQAPRGLIGGTKFLAPGTPARFSGSLLGGKAALTLSGVQPEDEAEYYCVLWYSNRWVFGGGTKLTVL

SEQ ID NO: 946 - protein, 986 aa, Artificial Sequence
  Synthetic peptide
EVQLLESGGGVVQPGRSLRLSCAASGFTFSSYAMSWVRQAPGKCLEWVSAISGSGGRTFYAESVEGRFTISRDNSKNTLYLQMNSLRAEDTAVYYCAKHDYSNYPYFDYWGQGTLVTVSSGGGGSGGGGSGGGGSEIVLTQSPGTLSLSPGERATLSCRASQSVRSNYLAWYQQKPGQAPRLLIYGASSRATGIPDRFSGSGSGTDFTLTINRLEPEDFAVYYCQQYGSSPPTFGCGTKVDIKSGGGGSEVQLVESGGGLVQPGGSLKLSCAASGFTFNKYAMNWVRQAPGKGLEWVARIRSKYNNYATYYADSVKDRFTISRDDSKNTAYLQMNNLKTEDTAVYYCVRHGNFGNSYISYWAYWGQGTLVTVSSGGGGSGGGGSGGGGSQTVVTQEPSLTVSPGGTVTLTCGSSTGAVTSGNYPNWVQQKPGQAPRGLIGGTKFLAPGTPARFSGSLLGGKAALTLSGVQPEDEAEYYCVLWYSNRWVFGGGTKLTVLGGGGDKTHTCPPCPAPELLGGPSVFLFPPKPKDTLMISRTPEVTCVVVDVSHEDPEVKFNWYVDGVEVHNAKTKPCEEQYGSTYRCVSVLTVLHQDWLNGKEYKCKVSNKALPAPIEKTISKAKGQPREPQVYTLPPSREEMTKNQVSLTCLVKGFYPSDIAVEWESNGQPENNYKTTPPVLDSDGSFFLYSKLTVDKSRWQQGNVFSCSVMHEALHNHYTQKSLSLSPGKGGGGSGGGGSGGGGSGGGGSGGGGSGGGGSDKTHTCPPCPAPELLGGPSVFLFPPKPKDTLMISRTPEVTCVVVDVSHEDPEVKFNWYVDGVEVHNAKTKPCEEQYGSTYRCVSVLTVLHQDWLNGKEYKCKVSNKALPAPIEKTISKAKGQPREPQVYTLPPSREEMTKNQVSLTCLVKGFYPSDIAVEWESNGQPENNYKTTPPVLDSDGSFFLYSKLTVDKSRWQQGNVFSCSVMHEALHNHYTQKSLSLSPGK

SEQ ID NO: 947 - protein, 120 aa, Artificial Sequence; identical to SEQ ID NO: 883
  Synthetic peptide

SEQ ID NO: 948 - protein, 108 aa, Artificial Sequence
  Synthetic peptide
EIVLTQSPGTLSLSPGERATLSCRASQSVRSNYLAWYQQKPGQAPRLLIYGASSRATGIPDRFSGSGSGTDFTLTINRLEPEDFAVYYCQQYGSSPPTFGGGTKVDIK

SEQ ID NO: 949 - protein, 243 aa, Artificial Sequence
  Synthetic peptide
EVQLLESGGGVVQPGRSLRLSCAASGFTFSSYAMSWVRQAPGKGLEWVSAISGSGGRTFYAESVEGRFTISRDNSKNTLYLQMNSLRAEDTAVYYCAKHDYSNYPYFDYWGQGTLVTVSSGGGGSGGGGSGGGGSEIVLTQSPGTLSLSPGERATLSCRASQSVRSNYLAWYQQKPGQAPRLLIYGASSRATGIPDRFSGSGSGTDFTLTINRLEPEDFAVYYCQQYGSSPPTFGGGTKVDIK

SEQ ID NO: 950 - protein, 498 aa, Artificial Sequence
  Synthetic peptide
EVQLLESGGGVVQPGRSLRLSCAASGFTFSSYAMSWVRQAPGKGLEWVSAISGSGGRTFYAESVEGRFTISRDNSKNTLYLQMNSLRAEDTAVYYCAKHDYSNYPYFDYWGQGTLVTVSSGGGGSGGGGSGGGGSEIVLTQSPGTLSLSPGERATLSCRASQSVRSNYLAWYQQKPGQAPRLLIYGASSRATGIPDRFSGSGSGTDFTLTINRLEPEDFAVYYCQQYGSSPPTFGGGTKVDIKSGGGGSEVQLVESGGGLVQPGGSLKLSCAASGFTFNKYAMNWVRQAPGKGLEWVARIRSKYNNYATYYADSVKDRFTISRDDSKNTAYLQMNNLKTEDTAVYYCVRHGNFGNSYISYWAYWGQGTLVTVSSGGGGSGGGGSGGGGSQTVVTQEPSLTVSPGGTVTLTCGSSTGAVTSGNYPNWVQQKPGQAPRGLIGGTKFLAPGTPARFSGSLLGGKAALTLSGVQPEDEAEYYCVLWYSNRWVFGGGTKLTVL

SEQ ID NO: 951 - protein, 986 aa, Artificial Sequence
  Synthetic peptide
EVQLLESGGGVVQPGRSLRLSCAASGFTFSSYAMSWVRQAPGKGLEWVSAISGSGGRTFYAESVEGRFTISRDNSKNTLYLQMNSLRAEDTAVYYCAKHDYSNYPYFDYWGQGTLVTVSSGGGGSGGGGSGGGGSEIVLTQSPGTLSLSPGERATLSCRASQSVRSNYLAWYQQKPGQAPRLLIYGASSRATGIPDRFSGSGSGTDFTLTINRLEPEDFAVYYCQQYGSSPPTFGGGTKVDIKSGGGGSEVQLVESGGGLVQPGGSLKLSCAASGFTFNKYAMNWVRQAPGKGLEWVARIRSKYNNYATYYADSVKDRFTISRDDSKNTAYLQMNNLKTEDTAVYYCVRHGNFGNSYISYWAYWGQGTLVTVSSGGGGSGGGGSGGGGSQTVVTQEPSLTVSPGGTVTLTCGSSTGAVTSGNYPNWVQQKPGQAPRGLIGGTKFLAPGTPARFSGSLLGGKAALTLSGVQPEDEAEYYCVLWYSNRWVFGGGTKLTVLGGGGDKTHTCPPCPAPELLGGPSVFLFPPKPKDTLMISRTPEVTCVVVDVSHEDPEVKFNWYVDGVEVHNAKTKPCEEQYGSTYRCVSVLTVLHQDWLNGKEYKCKVSNKALPAPIEKTISKAKGQPREPQVYTLPPSREEMTKNQVSLTCLVKGFYPSDIAVEWESNGQPENNYKTTPPVLDSDGSFFLYSKLTVDKSRWQQGNVFSCSVMHEALHNHYTQKSLSLSPGKGGGGSGGGGSGGGGSGGGGSGGGGSGGGGSDKTHTCPPCPAPELLGGPSVFLFPPKPKDTLMISRTPEVTCVVVDVSHEDPEVKFNWYVDGVEVHNAKTKPCEEQYGSTYRCVSVLTVLHQDWLNGKEYKCKVSNKALPAPIEKTISKAKGQPREPQVYTLPPSREEMTKNQVSLTCLVKGFYPSDIAVEWESNGQPENNYKTTPPVLDSDGSFFLYSKLTVDKSRWQQGNVFSCSVMHEALHNHYTQKSLSLSPGK

SEQ ID NO: 952 - protein, 5 aa, Artificial Sequence
  Synthetic peptide
SYAMS

SEQ ID NO: 953 - protein, 17 aa, Artificial Sequence
  Synthetic peptide
VISGSGGITDFAESVKG

SEQ ID NO: 954 - protein, 11 aa, Artificial Sequence
  Synthetic peptide
HDYSNYFFFDY

SEQ ID NO: 955 - protein, 11 aa, Artificial Sequence
  Synthetic peptide
RASQGISNYLA

SEQ ID NO: 956 - protein, 7 aa, Artificial Sequence
  Synthetic peptide
AASILQS

SEQ ID NO: 957 - protein, 9 aa, Artificial Sequence
  Synthetic peptide
QQYFAYPIT

SEQ ID NO: 958 - protein, 120 aa, Artificial Sequence
  Synthetic peptide
EVQLLESGGGLVQPGGSLRLSCAASGFTFSSYAMSWVRQAPGKCLEWVSVISGSGGITDFAESVKGRFTISRDNSRNTLYLQMNSLRAEDTAVYFCARHDYSNYFFFDYWGQGTLVTVSS

SEQ ID NO: 959 - protein, 107 aa, Artificial Sequence
  Synthetic peptide
DIQMTQSPSSLSASVGDRVTITCRASQGISNYLAWYQQKPGKVPKLLIYAASILQSGVPSKFSGSGSGTDFTLTISSLQPEDFAIYYCQQYFAYPITFGCGTRLEIK

SEQ ID NO: 960 - protein, 242 aa, Artificial Sequence
  Synthetic peptide
EVQLLESGGGLVQPGGSLRLSCAASGFTFSSYAMSWVRQAPGKCLEWVSVISGSGGITDFAESVKGRFTISRDNSRNTLYLQMNSLRAEDTAVYFCARHDYSNYFFFDYWGQGTLVTVSSGGGGSGGGGSGGGGSDIQMTQSPSSLSASVGDRVTITCRASQGISNYLAWYQQKPGKVPKLLIYAASILQSGVPSKFSGSGSGTDFTLTISSLQPEDFAIYYCQQYFAYPITFGCGTRLEIK

SEQ ID NO: 961 - protein, 497 aa, Artificial Sequence
  Synthetic peptide
EVQLLESGGGLVQPGGSLRLSCAASGFTFSSYAMSWVRQAPGKCLEWVSVISGSGGITDFAESVKGRFTISRDNSRNTLYLQMNSLRAEDTAVYFCARHDYSNYFFFDYWGQGTLVTVSSGGGGSGGGGSGGGGSDIQMTQSPSSLSASVGDRVTITCRASQGISNYLAWYQQKPGKVPKLLIYAASILQSGVPSKFSGSGSGTDFTLTISSLQPEDFAIYYCQQYFAYPITFGCGTRLEIKSGGGGSEVQLVESGGGLVQPGGSLKLSCAASGFTFNKYAMNWVRQAPGKGLEWVARIRSKYNNYATYYADSVKDRFTISRDDSKNTAYLQMNNLKTEDTAVYYCVRHGNFGNSYISYWAYWGQGTLVTVSSGGGGSGGGGSGGGGSQTVVTQEPSLTVSPGGTVTLTCGSSTGAVTSGNYPNWVQQKPGQAPRGLIGGTKFLAPGTPARFSGSLLGGKAALTLSGVQPEDEAEYYCVLWYSNRWVFGGGTKLTVL

SEQ ID NO: 962 - protein, 985 aa, Artificial Sequence
  Synthetic peptide
EVQLLESGGGLVQPGGSLRLSCAASGFTFSSYAMSWVRQAPGKCLEWVSVISGSGGITDFAESVKGRFTISRDNSRNTLYLQMNSLRAEDTAVYFCARHDYSNYFFFDYWGQGTLVTVSSGGGGSGGGGSGGGGSDIQMTQSPSSLSASVGDRVTITCRASQGISNYLAWYQQKPGKVPKLLIYAASILQSGVPSKFSGSGSGTDFTLTISSLQPEDFAIYYCQQYFAYPITFGCGTRLEIKSGGGGSEVQLVESGGGLVQPGGSLKLSCAASGFTFNKYAMNWVRQAPGKGLEWVARIRSKYNNYATYYADSVKDRFTISRDDSKNTAYLQMNNLKTEDTAVYYCVRHGNFGNSYISYWAYWGQGTLVTVSSGGGGSGGGGSGGGGSQTVVTQEPSLTVSPGGTVTLTCGSSTGAVTSGNYPNWVQQKPGQAPRGLIGGTKFLAPGTPARFSGSLLGGKAALTLSGVQPEDEAEYYCVLWYSNRWVFGGGTKLTVLGGGGDKTHTCPPCPAPELLGGPSVFLFPPKPKDTLMISRTPEVTCVVVDVSHEDPEVKFNWYVDGVEVHNAKTKPCEEQYGSTYRCVSVLTVLHQDWLNGKEYKCKVSNKALPAPIEKTISKAKGQPREPQVYTLPPSREEMTKNQVSLTCLVKGFYPSDIAVEWESNGQPENNYKTTPPVLDSDGSFFLYSKLTVDKSRWQQGNVFSCSVMHEALHNHYTQKSLSLSPGKGGGGSGGGGSGGGGSGGGGSGGGGSGGGGSDKTHTCPPCPAPELLGGPSVFLFPPKPKDTLMISRTPEVTCVVVDVSHEDPEVKFNWYVDGVEVHNAKTKPCEEQYGSTYRCVSVLTVLHQDWLNGKEYKCKVSNKALPAPIEKTISKAKGQPREPQVYTLPPSREEMTKNQVSLTCLVKGFYPSDIAVEWESNGQPENNYKTTPPVLDSDGSFFLYSKLTVDKSRWQQGNVFSCSVMHEALHNHYTQKSLSLSPGK

SEQ ID NO: 963 - protein, 120 aa, Artificial Sequence
  Synthetic peptide
EVQLLESGGGLVQPGGSLRLSCAASGFTFSSYAMSWVRQAPGKGLEWVSVISGSGGITDFAESVKGRFTISRDNSRNTLYLQMNSLRAEDTAVYFCARHDYSNYFFFDYWGQGTLVTVSS

SEQ ID NO: 964 - protein, 107 aa, Artificial Sequence
  Synthetic peptide
DIQMTQSPSSLSASVGDRVTITCRASQGISNYLAWYQQKPGKVPKLLIYAASILQSGVPSKFSGSGSGTDFTLTISSLQPEDFAIYYCQQYFAYPITFGQGTRLEIK

SEQ ID NO: 965 - protein, 242 aa, Artificial Sequence
  Synthetic peptide
EVQLLESGGGLVQPGGSLRLSCAASGFTFSSYAMSWVRQAPGKGLEWVSVISGSGGITDFAESVKGRFTISRDNSRNTLYLQMNSLRAEDTAVYFCARHDYSNYFFFDYWGQGTLVTVSSGGGGSGGGGSGGGGSDIQMTQSPSSLSASVGDRVTITCRASQGISNYLAWYQQKPGKVPKLLIYAASILQSGVPSKFSGSGSGTDFTLTISSLQPEDFAIYYCQQYFAYPITFGQGTRLEIK

SEQ ID NO: 966 - protein, 497 aa, Artificial Sequence
  Synthetic peptide
EVQLLESGGGLVQPGGSLRLSCAASGFTFSSYAMSWVRQAPGKGLEWVSVISGSGGITDFAESVKGRFTISRDNSRNTLYLQMNSLRAEDTAVYFCARHDYSNYFFFDYWGQGTLVTVSSGGGGSGGGGSGGGGSDIQMTQSPSSLSASVGDRVTITCRASQGISNYLAWYQQKPGKVPKLLIYAASILQSGVPSKFSGSGSGTDFTLTISSLQPEDFAIYYCQQYFAYPITFGQGTRLEIKSGGGGSEVQLVESGGGLVQPGGSLKLSCAASGFTFNKYAMNWVRQAPGKGLEWVARIRSKYNNYATYYADSVKDRFTISRDDSKNTAYLQMNNLKTEDTAVYYCVRHGNFGNSYISYWAYWGQGTLVTVSSGGGGSGGGGSGGGGSQTVVTQEPSLTVSPGGTVTLTCGSSTGAVTSGNYPNWVQQKPGQAPRGLIGGTKFLAPGTPARFSGSLLGGKAALTLSGVQPEDEAEYYCVLWYSNRWVFGGGTKLTVL

SEQ ID NO: 967 - protein, 985 aa, Artificial Sequence
  Synthetic peptide
EVQLLESGGGLVQPGGSLRLSCAASGFTFSSYAMSWVRQAPGKGLEWVSVISGSGGITDFAESVKGRFTISRDNSRNTLYLQMNSLRAEDTAVYFCARHDYSNYFFFDYWGQGTLVTVSSGGGGSGGGGSGGGGSDIQMTQSPSSLSASVGDRVTITCRASQGISNYLAWYQQKPGKVPKLLIYAASILQSGVPSKFSGSGSGTDFTLTISSLQPEDFAIYYCQQYFAYPITFGQGTRLEIKSGGGGSEVQLVESGGGLVQPGGSLKLSCAASGFTFNKYAMNWVRQAPGKGLEWVARIRSKYNNYATYYADSVKDRFTISRDDSKNTAYLQMNNLKTEDTAVYYCVRHGNFGNSYISYWAYWGQGTLVTVSSGGGGSGGGGSGGGGSQTVVTQEPSLTVSPGGTVTLTCGSSTGAVTSGNYPNWVQQKPGQAPRGLIGGTKFLAPGTPARFSGSLLGGKAALTLSGVQPEDEAEYYCVLWYSNRWVFGGGTKLTVLGGGGDKTHTCPPCPAPELLGGPSVFLFPPKPKDTLMISRTPEVTCVVVDVSHEDPEVKFNWYVDGVEVHNAKTKPCEEQYGSTYRCVSVLTVLHQDWLNGKEYKCKVSNKALPAPIEKTISKAKGQPREPQVYTLPPSREEMTKNQVSLTCLVKGFYPSDIAVEWESNGQPENNYKTTPPVLDSDGSFFLYSKLTVDKSRWQQGNVFSCSVMHEALHNHYTQKSLSLSPGKGGGGSGGGGSGGGGSGGGGSGGGGSGGGGSDKTHTCPPCPAPELLGGPSVFLFPPKPKDTLMISRTPEVTCVVVDVSHEDPEVKFNWYVDGVEVHNAKTKPCEEQYGSTYRCVSVLTVLHQDWLNGKEYKCKVSNKALPAPIEKTISKAKGQPREPQVYTLPPSREEMTKNQVSLTCLVKGFYPSDIAVEWESNGQPENNYKTTPPVLDSDGSFFLYSKLTVDKSRWQQGNVFSCSVMHEALHNHYTQKSLSLSPGK

SEQ ID NO: 968 - protein, 5 aa, Artificial Sequence
  Synthetic peptide
SYAMS

SEQ ID NO: 969 - protein, 17 aa, Artificial Sequence
  Synthetic peptide
AISGSGGRTFYAESVEG

SEQ ID NO: 970 - protein, 11 aa, Artificial Sequence
  Synthetic peptide
HDYSNYPYFDY

SEQ ID NO: 971 - protein, 12 aa, Artificial Sequence
  Synthetic peptide
RASQSVRSSYLA

SEQ ID NO: 972 - protein, 7 aa, Artificial Sequence
  Synthetic peptide
GASSRAT

SEQ ID NO: 973 - protein, 9 aa, Artificial Sequence
  Synthetic peptide
QQYGSSPPT

SEQ ID NO: 974 - protein, 120 aa, Artificial Sequence; identical to SEQ ID NO: 638
  Synthetic peptide

SEQ ID NO: 975 - protein, 108 aa, Artificial Sequence
  Synthetic peptide
EIVLTQSPGTLSLSPGERATLSCRASQSVRSSYLAWYQQKPGQAPRLLIYGASSRATGIPDRFSGSGSGTDFTLTISRLEPEDFAVYFCQQYGSSPPTFGCGTRLEIK

SEQ ID NO: 976 - protein, 243 aa, Artificial Sequence
  Synthetic peptide
EVQLLESGGGMVQPGGSLRLSCAASGFTFSSYAMSWVRQAPGKCLEWVSAISGSGGRTFYAESVEGRFTISRDNSKNTLYLQMNSLRAEDTAVYYCAKHDYSNYPYFDYWGQGTLVTVSSGGGGSGGGGSGGGGSEIVLTQSPGTLSLSPGERATLSCRASQSVRSSYLAWYQQKPGQAPRLLIYGASSRATGIPDRFSGSGSGTDFTLTISRLEPEDFAVYFCQQYGSSPPTFGCGTRLEIK

SEQ ID NO: 977 - protein, 498 aa, Artificial Sequence
  Synthetic peptide
EVQLLESGGGMVQPGGSLRLSCAASGFTFSSYAMSWVRQAPGKCLEWVSAISGSGGRTFYAESVEGRFTISRDNSKNTLYLQMNSLRAEDTAVYYCAKHDYSNYPYFDYWGQGTLVTVSSGGGGSGGGGSGGGGSEIVLTQSPGTLSLSPGERATLSCRASQSVRSSYLAWYQQKPGQAPRLLIYGASSRATGIPDRFSGSGSGTDFTLTISRLEPEDFAVYFCQQYGSSPPTFGCGTRLEIKSGGGGSEVQLVESGGGLVQPGGSLKLSCAASGFTFNKYAMNWVRQAPGKGLEWVARIRSKYNNYATYYADSVKDRFTISRDDSKNTAYLQMNNLKTEDTAVYYCVRHGNFGNSYISYWAYWGQGTLVTVSSGGGGSGGGGSGGGGSQTVVTQEPSLTVSPGGTVTLTCGSSTGAVTSGNYPNWVQQKPGQAPRGLIGGTKFLAPGTPARFSGSLLGGKAALTLSGVQPEDEAEYYCVLWYSNRWVFGGGTKLTVL

SEQ ID NO: 978 - protein, 986 aa, Artificial Sequence
  Synthetic peptide
EVQLLESGGGMVQPGGSLRLSCAASGFTFSSYAMSWVRQAPGKCLEWVSAISGSGGRTFYAESVEGRFTISRDNSKNTLYLQMNSLRAEDTAVYYCAKHDYSNYPYFDYWGQGTLVTVSSGGGGSGGGGSGGGGSEIVLTQSPGTLSLSPGERATLSCRASQSVRSSYLAWYQQKPGQAPRLLIYGASSRATGIPDRFSGSGSGTDFTLTISRLEPEDFAVYFCQQYGSSPPTFGCGTRLEIKSGGGGSEVQLVESGGGLVQPGGSLKLSCAASGFTFNKYAMNWVRQAPGKGLEWVARIRSKYNNYATYYADSVKDRFTISRDDSKNTAYLQMNNLKTEDTAVYYCVRHGNFGNSYISYWAYWGQGTLVTVSSGGGGSGGGGSGGGGSQTVVTQEPSLTVSPGGTVTLTCGSSTGAVTSGNYPNWVQQKPGQAPRGLIGGTKFLAPGTPARFSGSLLGGKAALTLSGVQPEDEAEYYCVLWYSNRWVFGGGTKLTVLGGGGDKTHTCPPCPAPELLGGPSVFLFPPKPKDTLMISRTPEVTCVVVDVSHEDPEVKFNWYVDGVEVHNAKTKPCEEQYGSTYRCVSVLTVLHQDWLNGKEYKCKVSNKALPAPIEKTISKAKGQPREPQVYTLPPSREEMTKNQVSLTCLVKGFYPSDIAVEWESNGQPENNYKTTPPVLDSDGSFFLYSKLTVDKSRWQQGNVFSCSVMHEALHNHYTQKSLSLSPGKGGGGSGGGGSGGGGSGGGGSGGGGSGGGGSDKTHTCPPCPAPELLGGPSVFLFPPKPKDTLMISRTPEVTCVVVDVSHEDPEVKFNWYVDGVEVHNAKTKPCEEQYGSTYRCVSVLTVLHQDWLNGKEYKCKVSNKALPAPIEKTISKAKGQPREPQVYTLPPSREEMTKNQVSLTCLVKGFYPSDIAVEWESNGQPENNYKTTPPVLDSDGSFFLYSKLTVDKSRWQQGNVFSCSVMHEALHNHYTQKSLSLSPGK

SEQ ID NO: 979 - protein, 120 aa, Artificial Sequence; identical to SEQ ID NO: 643
  Synthetic peptide

SEQ ID NO: 980 - protein, 108 aa, Artificial Sequence
  Synthetic peptide
EIVLTQSPGTLSLSPGERATLSCRASQSVRSSYLAWYQQKPGQAPRLLIYGASSRATGIPDRFSGSGSGTDFTLTISRLEPEDFAVYFCQQYGSSPPTFGGGTRLEIK

SEQ ID NO: 981 - protein, 243 aa, Artificial Sequence
  Synthetic peptide
EVQLLESGGGMVQPGGSLRLSCAASGFTFSSYAMSWVRQAPGKGLEWVSAISGSGGRTFYAESVEGRFTISRDNSKNTLYLQMNSLRAEDTAVYYCAKHDYSNYPYFDYWGQGTLVTVSSGGGGSGGGGSGGGGSEIVLTQSPGTLSLSPGERATLSCRASQSVRSSYLAWYQQKPGQAPRLLIYGASSRATGIPDRFSGSGSGTDFTLTISRLEPEDFAVYFCQQYGSSPPTFGGGTRLEIK

SEQ ID NO: 982 - protein, 498 aa, Artificial Sequence
  Synthetic peptide
EVQLLESGGGMVQPGGSLRLSCAASGFTFSSYAMSWVRQAPGKGLEWVSAISGSGGRTFYAESVEGRFTISRDNSKNTLYLQMNSLRAEDTAVYYCAKHDYSNYPYFDYWGQGTLVTVSSGGGGSGGGGSGGGGSEIVLTQSPGTLSLSPGERATLSCRASQSVRSSYLAWYQQKPGQAPRLLIYGASSRATGIPDRFSGSGSGTDFTLTISRLEPEDFAVYFCQQYGSSPPTFGGGTRLEIKSGGGGSEVQLVESGGGLVQPGGSLKLSCAASGFTFNKYAMNWVRQAPGKGLEWVARIRSKYNNYATYYADSVKDRFTISRDDSKNTAYLQMNNLKTEDTAVYYCVRHGNFGNSYISYWAYWGQGTLVTVSSGGGGSGGGGSGGGGSQTVVTQEPSLTVSPGGTVTLTCGSSTGAVTSGNYPNWVQQKPGQAPRGLIGGTKFLAPGTPARFSGSLLGGKAALTLSGVQPEDEAEYYCVLWYSNRWVFGGGTKLTVL

SEQ ID NO: 983 - protein, 986 aa, Artificial Sequence
  Synthetic peptide
EVQLLESGGGMVQPGGSLRLSCAASGFTFSSYAMSWVRQAPGKGLEWVSAISGSGGRTFYAESVEGRFTISRDNSKNTLYLQMNSLRAEDTAVYYCAKHDYSNYPYFDYWGQGTLVTVSSGGGGSGGGGSGGGGSEIVLTQSPGTLSLSPGERATLSCRASQSVRSSYLAWYQQKPGQAPRLLIYGASSRATGIPDRFSGSGSGTDFTLTISRLEPEDFAVYFCQQYGSSPPTFGGGTRLEIKSGGGGSEVQLVESGGGLVQPGGSLKLSCAASGFTFNKYAMNWVRQAPGKGLEWVARIRSKYNNYATYYADSVKDRFTISRDDSKNTAYLQMNNLKTEDTAVYYCVRHGNFGNSYISYWAYWGQGTLVTVSSGGGGSGGGGSGGGGSQTVVTQEPSLTVSPGGTVTLTCGSSTGAVTSGNYPNWVQQKPGQAPRGLIGGTKFLAPGTPARFSGSLLGGKAALTLSGVQPEDEAEYYCVLWYSNRWVFGGGTKLTVLGGGGDKTHTCPPCPAPELLGGPSVFLFPPKPKDTLMISRTPEVTCVVVDVSHEDPEVKFNWYVDGVEVHNAKTKPCEEQYGSTYRCVSVLTVLHQDWLNGKEYKCKVSNKALPAPIEKTISKAKGQPREPQVYTLPPSREEMTKNQVSLTCLVKGFYPSDIAVEWESNGQPENNYKTTPPVLDSDGSFFLYSKLTVDKSRWQQGNVFSCSVMHEALHNHYTQKSLSLSPGKGGGGSGGGGSGGGGSGGGGSGGGGSGGGGSDKTHTCPPCPAPELLGGPSVFLFPPKPKDTLMISRTPEVTCVVVDVSHEDPEVKFNWYVDGVEVHNAKTKPCEEQYGSTYRCVSVLTVLHQDWLNGKEYKCKVSNKALPAPIEKTISKAKGQPREPQVYTLPPSREEMTKNQVSLTCLVKGFYPSDIAVEWESNGQPENNYKTTPPVLDSDGSFFLYSKLTVDKSRWQQGNVFSCSVMHEALHNHYTQKSLSLSPGK

SEQ ID NO: 984 - protein, 5 aa, Artificial Sequence
  Synthetic peptide
IYAMS

SEQ ID NO: 985 - protein, 17 aa, Artificial Sequence
  Synthetic peptide
AIGGSGGSTFYAESVKG

SEQ ID NO: 986 - protein, 11 aa, Artificial Sequence
  Synthetic peptide
HDYSNYPYFDY

SEQ ID NO: 987 - protein, 12 aa, Artificial Sequence
  Synthetic peptide
RASQSVRSSYVA

SEQ ID NO: 988 - protein, 7 aa, Artificial Sequence
  Synthetic peptide
GASSRAT

SEQ ID NO: 989 - protein, 9 aa, Artificial Sequence
  Synthetic peptide
QQYGDLPFT

SEQ ID NO: 990 - protein, 120 aa, Artificial Sequence
  Synthetic peptide
EVQLLESGGGLVQPGGSLRLSCAASGFTFSIYAMSWVRQAPGKCLEWVSAIGGSGGSTFYAESVKGRFTISRDNSKNTLYLQMNSLRAEDTAVYYCAKHDYSNYPYFDYWGQGTLVTVSS

SEQ ID NO: 991 - protein, 108 aa, Artificial Sequence
  Synthetic peptide
EIVLTQSPGTLSLSPGERATLSCRASQSVRSSYVAWYQQKPGQAPRLLIYGASSRATGIPDRFSGSGSGTDFTLTISRLEPEDFAVYYCQQYGDLPFTFGCGTRLEIK

SEQ ID NO: 992 - protein, 243 aa, Artificial Sequence
  Synthetic peptide
EVQLLESGGGLVQPGGSLRLSCAASGFTFSIYAMSWVRQAPGKCLEWVSAIGGSGGSTFYAESVKGRFTISRDNSKNTLYLQMNSLRAEDTAVYYCAKHDYSNYPYFDYWGQGTLVTVSSGGGGSGGGGSGGGGSEIVLTQSPGTLSLSPGERATLSCRASQSVRSSYVAWYQQKPGQAPRLLIYGASSRATGIPDRFSGSGSGTDFTLTISRLEPEDFAVYYCQQYGDLPFTFGCGTRLEIK

SEQ ID NO: 993 - protein, 498 aa, Artificial Sequence
  Synthetic peptide
EVQLLESGGGLVQPGGSLRLSCAASGFTFSIYAMSWVRQAPGKCLEWVSAIGGSGGSTFYAESVKGRFTISRDNSKNTLYLQMNSLRAEDTAVYYCAKHDYSNYPYFDYWGQGTLVTVSSGGGGSGGGGSGGGGSEIVLTQSPGTLSLSPGERATLSCRASQSVRSSYVAWYQQKPGQAPRLLIYGASSRATGIPDRFSGSGSGTDFTLTISRLEPEDFAVYYCQQYGDLPFTFGCGTRLEIKSGGGGSEVQLVESGGGLVQPGGSLKLSCAASGFTFNKYAMNWVRQAPGKGLEWVARIRSKYNNYATYYADSVKDRFTISRDDSKNTAYLQMNNLKTEDTAVYYCVRHGNFGNSYISYWAYWGQGTLVTVSSGGGGSGGGGSGGGGSQTVVTQEPSLTVSPGGTVTLTCGSSTGAVTSGNYPNWVQQKPGQAPRGLIGGTKFLAPGTPARFSGSLLGGKAALTLSGVQPEDEAEYYCVLWYSNRWVFGGGTKLTVL

SEQ ID NO: 994 - protein, 986 aa, Artificial Sequence
  Synthetic peptide
EVQLLESGGGLVQPGGSLRLSCAASGFTFSIYAMSWVRQAPGKCLEWVSAIGGSGGSTFYAESVKGRFTISRDNSKNTLYLQMNSLRAEDTAVYYCAKHDYSNYPYFDYWGQGTLVTVSSGGGGSGGGGSGGGGSEIVLTQSPGTLSLSPGERATLSCRASQSVRSSYVAWYQQKPGQAPRLLIYGASSRATGIPDRFSGSGSGTDFTLTISRLEPEDFAVYYCQQYGDLPFTFGCGTRLEIKSGGGGSEVQLVESGGGLVQPGGSLKLSCAASGFTFNKYAMNWVRQAPGKGLEWVARIRSKYNNYATYYADSVKDRFTISRDDSKNTAYLQMNNLKTEDTAVYYCVRHGNFGNSYISYWAYWGQGTLVTVSSGGGGSGGGGSGGGGSQTVVTQEPSLTVSPGGTVTLTCGSSTGAVTSGNYPNWVQQKPGQAPRGLIGGTKFLAPGTPARFSGSLLGGKAALTLSGVQPEDEAEYYCVLWYSNRWVFGGGTKLTVLGGGGDKTHTCPPCPAPELLGGPSVFLFPPKPKDTLMISRTPEVTCVVVDVSHEDPEVKFNWYVDGVEVHNAKTKPCEEQYGSTYRCVSVLTVLHQDWLNGKEYKCKVSNKALPAPIEKTISKAKGQPREPQVYTLPPSREEMTKNQVSLTCLVKGFYPSDIAVEWESNGQPENNYKTTPPVLDSDGSFFLYSKLTVDKSRWQQGNVFSCSVMHEALHNHYTQKSLSLSPGKGGGGSGGGGSGGGGSGGGGSGGGGSGGGGSDKTHTCPPCPAPELLGGPSVFLFPPKPKDTLMISRTPEVTCVVVDVSHEDPEVKFNWYVDGVEVHNAKTKPCEEQYGSTYRCVSVLTVLHQDWLNGKEYKCKVSNKALPAPIEKTISKAKGQPREPQVYTLPPSREEMTKNQVSLTCLVKGFYPSDIAVEWESNGQPENNYKTTPPVLDSDGSFFLYSKLTVDKSRWQQGNVFSCSVMHEALHNHYTQKSLSLSPGK

SEQ ID NO: 995 - protein, 120 aa, Artificial Sequence
  Synthetic peptide
EVQLLESGGGLVQPGGSLRLSCAASGFTFSIYAMSWVRQAPGKGLEWVSAIGGSGGSTFYAESVKGRFTISRDNSKNTLYLQMNSLRAEDTAVYYCAKHDYSNYPYFDYWGQGTLVTVSS

SEQ ID NO: 996 - protein, 108 aa, Artificial Sequence
  Synthetic peptide
EIVLTQSPGTLSLSPGERATLSCRASQSVRSSYVAWYQQKPGQAPRLLIYGASSRATGIPDRFSGSGSGTDFTLTISRLEPEDFAVYYCQQYGDLPFTFGPGTRLEIK

SEQ ID NO: 997 - protein, 243 aa, Artificial Sequence
  Synthetic peptide
EVQLLESGGGLVQPGGSLRLSCAASGFTFSIYAMSWVRQAPGKGLEWVSAIGGSGGSTFYAESVKGRFTISRDNSKNTLYLQMNSLRAEDTAVYYCAKHDYSNYPYFDYWGQGTLVTVSSGGGGSGGGGSGGGGSEIVLTQSPGTLSLSPGERATLSCRASQSVRSSYVAWYQQKPGQAPRLLIYGASSRATGIPDRFSGSGSGTDFTLTISRLEPEDFAVYYCQQYGDLPFTFGPGTRLEIK

SEQ ID NO: 998 - protein, 498 aa, Artificial Sequence
  Synthetic peptide
EVQLLESGGGLVQPGGSLRLSCAASGFTFSIYAMSWVRQAPGKGLEWVSAIGGSGGSTFYAESVKGRFTISRDNSKNTLYLQMNSLRAEDTAVYYCAKHDYSNYPYFDYWGQGTLVTVSSGGGGSGGGGSGGGGSEIVLTQSPGTLSLSPGERATLSCRASQSVRSSYVAWYQQKPGQAPRLLIYGASSRATGIPDRFSGSGSGTDFTLTISRLEPEDFAVYYCQQYGDLPFTFGPGTRLEIKSGGGGSEVQLVESGGGLVQPGGSLKLSCAASGFTFNKYAMNWVRQAPGKGLEWVARIRSKYNNYATYYADSVKDRFTISRDDSKNTAYLQMNNLKTEDTAVYYCVRHGNFGNSYISYWAYWGQGTLVTVSSGGGGSGGGGSGGGGSQTVVTQEPSLTVSPGGTVTLTCGSSTGAVTSGNYPNWVQQKPGQAPRGLIGGTKFLAPGTPARFSGSLLGGKAALTLSGVQPEDEAEYYCVLWYSNRWVFGGGTKLTVL

SEQ ID NO: 999 - protein, 986 aa, Artificial Sequence
  Synthetic peptide
EVQLLESGGGLVQPGGSLRLSCAASGFTFSIYAMSWVRQAPGKGLEWVSAIGGSGGSTFYAESVKGRFTISRDNSKNTLYLQMNSLRAEDTAVYYCAKHDYSNYPYFDYWGQGTLVTVSSGGGGSGGGGSGGGGSEIVLTQSPGTLSLSPGERATLSCRASQSVRSSYVAWYQQKPGQAPRLLIYGASSRATGIPDRFSGSGSGTDFTLTISRLEPEDFAVYYCQQYGDLPFTFGPGTRLEIKSGGGGSEVQLVESGGGLVQPGGSLKLSCAASGFTFNKYAMNWVRQAPGKGLEWVARIRSKYNNYATYYADSVKDRFTISRDDSKNTAYLQMNNLKTEDTAVYYCVRHGNFGNSYISYWAYWGQGTLVTVSSGGGGSGGGGSGGGGSQTVVTQEPSLTVSPGGTVTLTCGSSTGAVTSGNYPNWVQQKPGQAPRGLIGGTKFLAPGTPARFSGSLLGGKAALTLSGVQPEDEAEYYCVLWYSNRWVFGGGTKLTVLGGGGDKTHTCPPCPAPELLGGPSVFLFPPKPKDTLMISRTPEVTCVVVDVSHEDPEVKFNWYVDGVEVHNAKTKPCEEQYGSTYRCVSVLTVLHQDWLNGKEYKCKVSNKALPAPIEKTISKAKGQPREPQVYTLPPSREEMTKNQVSLTCLVKGFYPSDIAVEWESNGQPENNYKTTPPVLDSDGSFFLYSKLTVDKSRWQQGNVFSCSVMHEALHNHYTQKSLSLSPGKGGGGSGGGGSGGGGSGGGGSGGGGSGGGGSDKTHTCPPCPAPELLGGPSVFLFPPKPKDTLMISRTPEVTCVVVDVSHEDPEVKFNWYVDGVEVHNAKTKPCEEQYGSTYRCVSVLTVLHQDWLNGKEYKCKVSNKALPAPIEKTISKAKGQPREPQVYTLPPSREEMTKNQVSLTCLVKGFYPSDIAVEWESNGQPENNYKTTPPVLDSDGSFFLYSKLTVDKSRWQQGNVFSCSVMHEALHNHYTQKSLSLSPGK

SEQ ID NO: 1000 - protein, 7 aa, Artificial Sequence
  Synthetic peptide
SSSYYWG

SEQ ID NO: 1001 - protein, 16 aa, Artificial Sequence
  Synthetic peptide
SIYHSGGTYFNPSLKS

SEQ ID NO: 1002 - protein, 15 aa, Artificial Sequence
  Synthetic peptide
HYEILTGYYPDVFDI

SEQ ID NO: 1003 - protein, 11 aa, Artificial Sequence
  Synthetic peptide
RASQSISSYLN

SEQ ID NO: 1004 - protein, 7 aa, Artificial Sequence
  Synthetic peptide
AASNLQS

SEQ ID NO: 1005 - protein, 9 aa, Artificial Sequence
  Synthetic peptide
QQSFSSPRT

SEQ ID NO: 1006 - protein, 125 aa, Artificial Sequence
  Synthetic peptide
QVQLQESGPGLVKPSQTLSLTCTVSGGSISSSSYYWGWIRQPPGKCLEWIGSIYHSGGTYFNPSLKSRVTISVDTSKNQFSLKLSSVTAADTAVYYCARHYEILTGYYPDVFDIWGQGTMVTVSS

SEQ ID NO: 1007 - protein, 107 aa, Artificial Sequence
  Synthetic peptide
DIQMTQSPSSLSASVGDRVTITCRASQSISSYLNWYQQKPGKAPKLLIYAASNLQSGVSSRFSGSGSGTDFTLTISSLQPEDFATYYCQQSFSSPRTFGCGTKVEIK

SEQ ID NO: 1008 - protein, 247 aa, Artificial Sequence
  Synthetic peptide
QVQLQESGPGLVKPSQTLSLTCTVSGGSISSSSYYWGWIRQPPGKCLEWIGSIYHSGGTYFNPSLKSRVTISVDTSKNQFSLKLSSVTAADTAVYYCARHYEILTGYYPDVFDIWGQGTMVTVSSGGGGSGGGGSGGGGSDIQMTQSPSSLSASVGDRVTITCRASQSISSYLNWYQQKPGKAPKLLIYAASNLQSGVSSRFSGSGSGTDFTLTISSLQPEDFATYYCQQSFSSPRTFGCGTKVEIK

SEQ ID NO: 1009 - protein, 502 aa, Artificial Sequence
  Synthetic peptide
QVQLQESGPGLVKPSQTLSLTCTVSGGSISSSSYYWGWIRQPPGKCLEWIGSIYHSGGTYFNPSLKSRVTISVDTSKNQFSLKLSSVTAADTAVYYCARHYEILTGYYPDVFDIWGQGTMVTVSSGGGGSGGGGSGGGGSDIQMTQSPSSLSASVGDRVTITCRASQSISSYLNWYQQKPGKAPKLLIYAASNLQSGVSSRFSGSGSGTDFTLTISSLQPEDFATYYCQQSFSSPRTFGCGTKVEIKSGGGGSEVQLVESGGGLVQPGGSLKLSCAASGFTFNKYAMNWVRQAPGKGLEWVARIRSKYNNYATYYADSVKDRFTISRDDSKNTAYLQMNNLKTEDTAVYYCVRHGNFGNSYISYWAYWGQGTLVTVSSGGGGSGGGGSGGGGSQTVVTQEPSLTVSPGGTVTLTCGSSTGAVTSGNYPNWVQQKPGQAPRGLIGGTKFLAPGTPARFSGSLLGGKAALTLSGVQPEDEAEYYCVLWYSNRWVFGGGTKLTVL

SEQ ID NO: 1010 - protein, 990 aa, Artificial Sequence
  Synthetic peptide
QVQLQESGPGLVKPSQTLSLTCTVSGGSISSSSYYWGWIRQPPGKCLEWIGSIYHSGGTYFNPSLKSRVTISVDTSKNQFSLKLSSVTAADTAVYYCARHYEILTGYYPDVFDIWGQGTMVTVSSGGGGSGGGGSGGGGSDIQMTQSPSSLSASVGDRVTITCRASQSISSYLNWYQQKPGKAPKLLIYAASNLQSGVSSRFSGSGSGTDFTLTISSLQPEDFATYYCQQSFSSPRTFGCGTKVEIKSGGGGSEVQLVESGGGLVQPGGSLKLSCAASGFTFNKYAMNWVRQAPGKGLEWVARIRSKYNNYATYYADSVKDRFTISRDDSKNTAYLQMNNLKTEDTAVYYCVRHGNFGNSYISYWAYWGQGTLVTVSSGGGGSGGGGSGGGGSQTVVTQEPSLTVSPGGTVTLTCGSSTGAVTSGNYPNWVQQKPGQAPRGLIGGTKFLAPGTPARFSGSLLGGKAALTLSGVQPEDEAEYYCVLWYSNRWVFGGGTKLTVLGGGGDKTHTCPPCPAPELLGGPSVFLFPPKPKDTLMISRTPEVTCVVVDVSHEDPEVKFNWYVDGVEVHNAKTKPCEEQYGSTYRCVSVLTVLHQDWLNGKEYKCKVSNKALPAPIEKTISKAKGQPREPQVYTLPPSREEMTKNQVSLTCLVKGFYPSDIAVEWESNGQPENNYKTTPPVLDSDGSFFLYSKLTVDKSRWQQGNVFSCSVMHEALHNHYTQKSLSLSPGKGGGGSGGGGSGGGGSGGGGSGGGGSGGGGSDKTHTCPPCPAPELLGGPSVFLFPPKPKDTLMISRTPEVTCVVVDVSHEDPEVKFNWYVDGVEVHNAKTKPCEEQYGSTYRCVSVLTVLHQDWLNGKEYKCKVSNKALPAPIEKTISKAKGQPREPQVYTLPPSREEMTKNQVSLTCLVKGFYPSDIAVEWESNGQPENNYKTTPPVLDSDGSFFLYSKLTVDKSRWQQGNVFSCSVMHEALHNHYTQKSLSLSPGK

SEQ ID NO: 1011 - protein, 125 aa, Artificial Sequence
  Synthetic peptide
QVQLQESGPGLVKPSQTLSLTCTVSGGSISSSSYYWGWIRQPPGKGLEWIGSIYHSGGTYFNPSLKSRVTISVDTSKNQFSLKLSSVTAADTAVYYCARHYEILTGYYPDVFDIWGQGTMVTVSS

SEQ ID NO: 1012 - protein, 107 aa, Artificial Sequence
  Synthetic peptide
DIQMTQSPSSLSASVGDRVTITCRASQSISSYLNWYQQKPGKAPKLLIYAASNLQSGVSSRFSGSGSGTDFTLTISSLQPEDFATYYCQQSFSSPRTFGQGTKVEIK

SEQ ID NO: 1013 - protein, 247 aa, Artificial Sequence
  Synthetic peptide
QVQLQESGPGLVKPSQTLSLTCTVSGGSISSSSYYWGWIRQPPGKGLEWIGSIYHSGGTYFNPSLKSRVTISVDTSKNQFSLKLSSVTAADTAVYYCARHYEILTGYYPDVFDIWGQGTMVTVSSGGGGSGGGGSGGGGSDIQMTQSPSSLSASVGDRVTITCRASQSISSYLNWYQQKPGKAPKLLIYAASNLQSGVSSRFSGSGSGTDFTLTISSLQPEDFATYYCQQSFSSPRTFGQGTKVEIK

SEQ ID NO: 1014 - protein, 502 aa, Artificial Sequence [sequence omitted]

SEQ ID NO: 1015 - protein, 990 aa, Artificial Sequence
  Synthetic peptide
QVQLQESGPGLVKPSQTLSLTCTVSGGSISSSSYYWGWIRQPPGKGLEWIGSIYHSGGTYFNPSLKSRVTISVDTSKNQFSLKLSSVTAADTAVYYCARHYEILTGYYPDVFDIWGQGTMVTVSSGGGGSGGGGSGGGGSDIQMTQSPSSLSASVGDRVTITCRASQSISSYLNWYQQKPGKAPKLLIYAASNLQSGVSSRFSGSGSGTDFTLTISSLQPEDFATYYCQQSFSSPRTFGQGTKVEIKSGGGGSEVQLVESGGGLVQPGGSLKLSCAASGFTFNKYAMNWVRQAPGKGLEWVARIRSKYNNYATYYADSVKDRFTISRDDSKNTAYLQMNNLKTEDTAVYYCVRHGNFGNSYISYWAYWGQGTLVTVSSGGGGSGGGGSGGGGSQTVVTQEPSLTVSPGGTVTLTCGSSTGAVTSGNYPNWVQQKPGQAPRGLIGGTKFLAPGTPARFSGSLLGGKAALTLSGVQPEDEAEYYCVLWYSNRWVFGGGTKLTVLGGGGDKTHTCPPCPAPELLGGPSVFLFPPKPKDTLMISRTPEVTCVVVDVSHEDPEVKFNWYVDGVEVHNAKTKPCEEQYGSTYRCVSVLTVLHQDWLNGKEYKCKVSNKALPAPIEKTISKAKGQPREPQVYTLPPSREEMTKNQVSLTCLVKGFYPSDIAVEWESNGQPENNYKTTPPVLDSDGSFFLYSKLTVDKSRWQQGNVFSCSVMHEALHNHYTQKSLSLSPGKGGGGSGGGGSGGGGSGGGGSGGGGSGGGGSDKTHTCPPCPAPELLGGPSVFLFPPKPKDTLMISRTPEVTCVVVDVSHEDPEVKFNWYVDGVEVHNAKTKPCEEQYGSTYRCVSVLTVLHQDWLNGKEYKCKVSNKALPAPIEKTISKAKGQPREPQVYTLPPSREEMTKNQVSLTCLVKGFYPSDIAVEWESNGQPENNYKTTPPVLDSDGSFFLYSKLTVDKSRWQQGNVFSCSVMHEALHNHYTQKSLSLSPGK

SEQ ID NO: 1016 - protein, 5 aa, Artificial Sequence
  Synthetic peptide
SYSMN

SEQ ID NO: 1017 - protein, 17 aa, Artificial Sequence
  Synthetic peptide
YISSSGGYIYYAESVKG

SEQ ID NO: 1018 - protein, 11 aa, Artificial Sequence
  Synthetic peptide
GDYSNYAYFDY

SEQ ID NO: 1019 - protein, 11 aa, Artificial Sequence
  Synthetic peptide
RASQGISNYLA

SEQ ID NO: 1020 - protein, 7 aa, Artificial Sequence
  Synthetic peptide
AASTLQS

SEQ ID NO: 1021 - protein, 9 aa, Artificial Sequence
  Synthetic peptide
QQYYSTPLT

SEQ ID NO: 1022 - protein, 120 aa, Artificial Sequence
  Synthetic peptide
EVQLVESGGGLVKPGGSLRLSCAASGFTFSSYSMNWVRQAPGKCLEWVSYISSSGGYIYYAESVKGRFTISRDNAKNSLYLQMNSLRAEDAAVYYCSRGDYSNYAYFDYWGQGTLVTVSS

SEQ ID NO: 1023 - protein, 107 aa, Artificial Sequence
  Synthetic peptide
DIQMTQSPSSLSASVGDRVTITCRASQGISNYLAWYQQKPGKVPKLLIYAASTLQSGVPSRFSGSGSGTDFTLTISSLQAEDVAVYYCQQYYSTPLTFGCGTKVEIK

SEQ ID NO: 1024 - protein, 242 aa, Artificial Sequence
  Synthetic peptide
EVQLVESGGGLVKPGGSLRLSCAASGFTFSSYSMNWVRQAPGKCLEWVSYISSSGGYIYYAESVKGRFTISRDNAKNSLYLQMNSLRAEDAAVYYCSRGDYSNYAYFDYWGQGTLVTVSSGGGGSGGGGSGGGGSDIQMTQSPSSLSASVGDRVTITCRASQGISNYLAWYQQKPGKVPKLLIYAASTLQSGVPSRFSGSGSGTDFTLTISSLQAEDVAVYYCQQYYSTPLTFGCGTKVEIK

SEQ ID NO: 1025 - protein, 497 aa, Artificial Sequence
  Synthetic peptide
EVQLVESGGGLVKPGGSLRLSCAASGFTFSSYSMNWVRQAPGKCLEWVSYISSSGGYIYYAESVKGRFTISRDNAKNSLYLQMNSLRAEDAAVYYCSRGDYSNYAYFDYWGQGTLVTVSSGGGGSGGGGSGGGGSDIQMTQSPSSLSASVGDRVTITCRASQGISNYLAWYQQKPGKVPKLLIYAASTLQSGVPSRFSGSGSGTDFTLTISSLQAEDVAVYYCQQYYSTPLTFGCGTKVEIKSGGGGSEVQLVESGGGLVQPGGSLKLSCAASGFTFNKYAMNWVRQAPGKGLEWVARIRSKYNNYATYYADSVKDRFTISRDDSKNTAYLQMNNLKTEDTAVYYCVRHGNFGNSYISYWAYWGQGTLVTVSSGGGGSGGGGSGGGGSQTVVTQEPSLTVSPGGTVTLTCGSSTGAVTSGNYPNWVQQKPGQAPRGLIGGTKFLAPGTPARFSGSLLGGKAALTLSGVQPEDEAEYYCVLWYSNRWVFGGGTKLTVL

SEQ ID NO: 1026 - protein, 985 aa, Artificial Sequence
  Synthetic peptide
EVQLVESGGGLVKPGGSLRLSCAASGFTFSSYSMNWVRQAPGKCLEWVSYISSSGGYIYYAESVKGRFTISRDNAKNSLYLQMNSLRAEDAAVYYCSRGDYSNYAYFDYWGQGTLVTVSSGGGGSGGGGSGGGGSDIQMTQSPSSLSASVGDRVTITCRASQGISNYLAWYQQKPGKVPKLLIYAASTLQSGVPSRFSGSGSGTDFTLTISSLQAEDVAVYYCQQYYSTPLTFGCGTKVEIKSGGGGSEVQLVESGGGLVQPGGSLKLSCAASGFTFNKYAMNWVRQAPGKGLEWVARIRSKYNNYATYYADSVKDRFTISRDDSKNTAYLQMNNLKTEDTAVYYCVRHGNFGNSYISYWAYWGQGTLVTVSSGGGGSGGGGSGGGGSQTVVTQEPSLTVSPGGTVTLTCGSSTGAVTSGNYPNWVQQKPGQAPRGLIGGTKFLAPGTPARFSGSLLGGKAALTLSGVQPEDEAEYYCVLWYSNRWVFGGGTKLTVLGGGGDKTHTCPPCPAPELLGGPSVFLFPPKPKDTLMISRTPEVTCVVVDVSHEDPEVKFNWYVDGVEVHNAKTKPCEEQYGSTYRCVSVLTVLHQDWLNGKEYKCKVSNKALPAPIEKTISKAKGQPREPQVYTLPPSREEMTKNQVSLTCLVKGFYPSDIAVEWESNGQPENNYKTTPPVLDSDGSFFLYSKLTVDKSRWQQGNVFSCSVMHEALHNHYTQKSLSLSPGKGGGGSGGGGSGGGGSGGGGSGGGGSGGGGSDKTHTCPPCPAPELLGGPSVFLFPPKPKDTLMISRTPEVTCVVVDVSHEDPEVKFNWYVDGVEVHNAKTKPCEEQYGSTYRCVSVLTVLHQDWLNGKEYKCKVSNKALPAPIEKTISKAKGQPREPQVYTLPPSREEMTKNQVSLTCLVKGFYPSDIAVEWESNGQPENNYKTTPPVLDSDGSFFLYSKLTVDKSRWQQGNVFSCSVMHEALHNHYTQKSLSLSPGK

SEQ ID NO: 1027 - protein, 120 aa, Artificial Sequence
  Synthetic peptide
EVQLVESGGGLVKPGGSLRLSCAASGFTFSSYSMNWVRQAPGKGLEWVSYISSSGGYIYYAESVKGRFTISRDNAKNSLYLQMNSLRAEDAAVYYCSRGDYSNYAYFDYWGQGTLVTVSS

SEQ ID NO: 1028 - protein, 107 aa, Artificial Sequence
  Synthetic peptide
DIQMTQSPSSLSASVGDRVTITCRASQGISNYLAWYQQKPGKVPKLLIYAASTLQSGVPSRFSGSGSGTDFTLTISSLQAEDVAVYYCQQYYSTPLTFGGGTKVEIK

SEQ ID NO: 1029 - protein, 242 aa, Artificial Sequence
  Synthetic peptide
EVQLVESGGGLVKPGGSLRLSCAASGFTFSSYSMNWVRQAPGKGLEWVSYISSSGGYIYYAESVKGRFTISRDNAKNSLYLQMNSLRAEDAAVYYCSRGDYSNYAYFDYWGQGTLVTVSSGGGGSGGGGSGGGGSDIQMTQSPSSLSASVGDRVTITCRASQGISNYLAWYQQKPGKVPKLLIYAASTLQSGVPSRFSGSGSGTDFTLTISSLQAEDVAVYYCQQYYSTPLTFGGGTKVEIK

SEQ ID NO: 1030 - protein, 497 aa, Artificial Sequence
  Synthetic peptide
EVQLVESGGGLVKPGGSLRLSCAASGFTFSSYSMNWVRQAPGKGLEWVSYISSSGGYIYYAESVKGRFTISRDNAKNSLYLQMNSLRAEDAAVYYCSRGDYSNYAYFDYWGQGTLVTVSSGGGGSGGGGSGGGGSDIQMTQSPSSLSASVGDRVTITCRASQGISNYLAWYQQKPGKVPKLLIYAASTLQSGVPSRFSGSGSGTDFTLTISSLQAEDVAVYYCQQYYSTPLTFGGGTKVEIKSGGGGSEVQLVESGGGLVQPGGSLKLSCAASGFTFNKYAMNWVRQAPGKGLEWVARIRSKYNNYATYYADSVKDRFTISRDDSKNTAYLQMNNLKTEDTAVYYCVRHGNFGNSYISYWAYWGQGTLVTVSSGGGGSGGGGSGGGGSQTVVTQEPSLTVSPGGTVTLTCGSSTGAVTSGNYPNWVQQKPGQAPRGLIGGTKFLAPGTPARFSGSLLGGKAALTLSGVQPEDEAEYYCVLWYSNRWVFGGGTKLTVL

SEQ ID NO: 1031 - protein, 985 aa, Artificial Sequence
  Synthetic peptide
EVQLVESGGGLVKPGGSLRLSCAASGFTFSSYSMNWVRQAPGKGLEWVSYISSSGGYIYYAESVKGRFTISRDNAKNSLYLQMNSLRAEDAAVYYCSRGDYSNYAYFDYWGQGTLVTVSSGGGGSGGGGSGGGGSDIQMTQSPSSLSASVGDRVTITCRASQGISNYLAWYQQKPGKVPKLLIYAASTLQSGVPSRFSGSGSGTDFTLTISSLQAEDVAVYYCQQYYSTPLTFGGGTKVEIKSGGGGSEVQLVESGGGLVQPGGSLKLSCAASGFTFNKYAMNWVRQAPGKGLEWVARIRSKYNNYATYYADSVKDRFTISRDDSKNTAYLQMNNLKTEDTAVYYCVRHGNFGNSYISYWAYWGQGTLVTVSSGGGGSGGGGSGGGGSQTVVTQEPSLTVSPGGTVTLTCGSSTGAVTSGNYPNWVQQKPGQAPRGLIGGTKFLAPGTPARFSGSLLGGKAALTLSGVQPEDEAEYYCVLWYSNRWVFGGGTKLTVLGGGGDKTHTCPPCPAPELLGGPSVFLFPPKPKDTLMISRTPEVTCVVVDVSHEDPEVKFNWYVDGVEVHNAKTKPCEEQYGSTYRCVSVLTVLHQDWLNGKEYKCKVSNKALPAPIEKTISKAKGQPREPQVYTLPPSREEMTKNQVSLTCLVKGFYPSDIAVEWESNGQPENNYKTTPPVLDSDGSFFLYSKLTVDKSRWQQGNVFSCSVMHEALHNHYTQKSLSLSPGKGGGGSGGGGSGGGGSGGGGSGGGGSGGGGSDKTHTCPPCPAPELLGGPSVFLFPPKPKDTLMISRTPEVTCVVVDVSHEDPEVKFNWYVDGVEVHNAKTKPCEEQYGSTYRCVSVLTVLHQDWLNGKEYKCKVSNKALPAPIEKTISKAKGQPREPQVYTLPPSREEMTKNQVSLTCLVKGFYPSDIAVEWESNGQPENNYKTTPPVLDSDGSFFLYSKLTVDKSRWQQGNVFSCSVMHEALHNHYTQKSLSLSPGK

SEQ ID NO: 1032 - protein, 5 aa, Artificial Sequence
  Synthetic peptide
VYAMS

SEQ ID NO: 1033 - protein, 17 aa, Artificial Sequence
  Synthetic peptide
TISGSGGSTFYAESVKG

SEQ ID NO: 1034 - protein, 11 aa, Artificial Sequence
  Synthetic peptide
HDYSNYAYFDY

SEQ ID NO: 1035 - protein, 12 aa, Artificial Sequence
  Synthetic peptide
RASQSVRSSYLA

SEQ ID NO: 1036 - protein, 7 aa, Artificial Sequence
  Synthetic peptide
GASSRAT

SEQ ID NO: 1037 - protein, 9 aa, Artificial Sequence
  Synthetic peptide
QQYGDLPFT

SEQ ID NO: 1038 - protein, 120 aa, Artificial Sequence
  Synthetic peptide
EVQLLESGGGLVQPGGSLRLSCAASGFTFSVYAMSWVRQAPGKCLEWVSTISGSGGSTFYAESVKGRFTISRDNSKNTLYLQMNRLRAEDTAVYYCARHDYSNYAYFDYWGQGTLVTVSS

SEQ ID NO: 1039 - protein, 108 aa, Artificial Sequence; identical to SEQ ID NO: 735
  Synthetic peptide

SEQ ID NO: 1040 - protein, 243 aa, Artificial Sequence
  Synthetic peptide
EVQLLESGGGLVQPGGSLRLSCAASGFTFSVYAMSWVRQAPGKCLEWVSTISGSGGSTFYAESVKGRFTISRDNSKNTLYLQMNRLRAEDTAVYYCARHDYSNYAYFDYWGQGTLVTVSSGGGGSGGGGSGGGGSEIVLTQSPGTLSLSPGERATLSCRASQSVRSSYLAWYQQKPGQAPRLLIYGASSRATGIPDRFSGSGSGTDFTLTISRLEPEDFAVYYCQQYGDLPFTFGCGTKVEIK

SEQ ID NO: 1041 - protein, 498 aa, Artificial Sequence
  Synthetic peptide
EVQLLESGGGLVQPGGSLRLSCAASGFTFSVYAMSWVRQAPGKCLEWVSTISGSGGSTFYAESVKGRFTISRDNSKNTLYLQMNRLRAEDTAVYYCARHDYSNYAYFDYWGQGTLVTVSSGGGGSGGGGSGGGGSEIVLTQSPGTLSLSPGERATLSCRASQSVRSSYLAWYQQKPGQAPRLLIYGASSRATGIPDRFSGSGSGTDFTLTISRLEPEDFAVYYCQQYGDLPFTFGCGTKVEIKSGGGGSEVQLVESGGGLVQPGGSLKLSCAASGFTFNKYAMNWVRQAPGKGLEWVARIRSKYNNYATYYADSVKDRFTISRDDSKNTAYLQMNNLKTEDTAVYYCVRHGNFGNSYISYWAYWGQGTLVTVSSGGGGSGGGGSGGGGSQTVVTQEPSLTVSPGGTVTLTCGSSTGAVTSGNYPNWVQQKPGQAPRGLIGGTKFLAPGTPARFSGSLLGGKAALTLSGVQPEDEAEYYCVLWYSNRWVFGGGTKLTVL

SEQ ID NO: 1042 - protein, 986 aa, Artificial Sequence
  Synthetic peptide
EVQLLESGGGLVQPGGSLRLSCAASGFTFSVYAMSWVRQAPGKCLEWVSTISGSGGSTFYAESVKGRFTISRDNSKNTLYLQMNRLRAEDTAVYYCARHDYSNYAYFDYWGQGTLVTVSSGGGGSGGGGSGGGGSEIVLTQSPGTLSLSPGERATLSCRASQSVRSSYLAWYQQKPGQAPRLLIYGASSRATGIPDRFSGSGSGTDFTLTISRLEPEDFAVYYCQQYGDLPFTFGCGTKVEIKSGGGGSEVQLVESGGGLVQPGGSLKLSCAASGFTFNKYAMNWVRQAPGKGLEWVARIRSKYNNYATYYADSVKDRFTISRDDSKNTAYLQMNNLKTEDTAVYYCVRHGNFGNSYISYWAYWGQGTLVTVSSGGGGSGGGGSGGGGSQTVVTQEPSLTVSPGGTVTLTCGSSTGAVTSGNYPNWVQQKPGQAPRGLIGGTKFLAPGTPARFSGSLLGGKAALTLSGVQPEDEAEYYCVLWYSNRWVFGGGTKLTVLGGGGDKTHTCPPCPAPELLGGPSVFLFPPKPKDTLMISRTPEVTCVVVDVSHEDPEVKFNWYVDGVEVHNAKTKPCEEQYGSTYRCVSVLTVLHQDWLNGKEYKCKVSNKALPAPIEKTISKAKGQPREPQVYTLPPSREEMTKNQVSLTCLVKGFYPSDIAVEWESNGQPENNYKTTPPVLDSDGSFFLYSKLTVDKSRWQQGNVFSCSVMHEALHNHYTQKSLSLSPGKGGGGSGGGGSGGGGSGGGGSGGGGSGGGGSDKTHTCPPCPAPELLGGPSVFLFPPKPKDTLMISRTPEVTCVVVDVSHEDPEVKFNWYVDGVEVHNAKTKPCEEQYGSTYRCVSVLTVLHQDWLNGKEYKCKVSNKALPAPIEKTISKAKGQPREPQVYTLPPSREEMTKNQVSLTCLVKGFYPSDIAVEWESNGQPENNYKTTPPVLDSDGSFFLYSKLTVDKSRWQQGNVFSCSVMHEALHNHYTQKSLSLSPGK

SEQ ID NO: 1043 - protein, 120 aa, Artificial Sequence
  Synthetic peptide
EVQLLESGGGLVQPGGSLRLSCAASGFTFSVYAMSWVRQAPGKGLEWVSTISGSGGSTFYAESVKGRFTISRDNSKNTLYLQMNRLRAEDTAVYYCARHDYSNYAYFDYWGQGTLVTVSS

SEQ ID NO: 1044 - protein, 108 aa, Artificial Sequence; identical to SEQ ID NO: 740
  Synthetic peptide

SEQ ID NO: 1045 - protein, 243 aa, Artificial Sequence
  Synthetic peptide
EVQLLESGGGLVQPGGSLRLSCAASGFTFSVYAMSWVRQAPGKGLEWVSTISGSGGSTFYAESVKGRFTISRDNSKNTLYLQMNRLRAEDTAVYYCARHDYSNYAYFDYWGQGTLVTVSSGGGGSGGGGSGGGGSEIVLTQSPGTLSLSPGERATLSCRASQSVRSSYLAWYQQKPGQAPRLLIYGASSRATGIPDRFSGSGSGTDFTLTISRLEPEDFAVYYCQQYGDLPFTFGPGTKVEIK

SEQ ID NO: 1046 - protein, 498 aa, Artificial Sequence
  Synthetic peptide
EVQLLESGGGLVQPGGSLRLSCAASGFTFSVYAMSWVRQAPGKGLEWVSTISGSGGSTFYAESVKGRFTISRDNSKNTLYLQMNRLRAEDTAVYYCARHDYSNYAYFDYWGQGTLVTVSSGGGGSGGGGSGGGGSEIVLTQSPGTLSLSPGERATLSCRASQSVRSSYLAWYQQKPGQAPRLLIYGASSRATGIPDRFSGSGSGTDFTLTISRLEPEDFAVYYCQQYGDLPFTFGPGTKVEIKSGGGGSEVQLVESGGGLVQPGGSLKLSCAASGFTFNKYAMNWVRQAPGKGLEWVARIRSKYNNYATYYADSVKDRFTISRDDSKNTAYLQMNNLKTEDTAVYYCVRHGNFGNSYISYWAYWGQGTLVTVSSGGGGSGGGGSGGGGSQTVVTQEPSLTVSPGGTVTLTCGSSTGAVTSGNYPNWVQQKPGQAPRGLIGGTKFLAPGTPARFSGSLLGGKAALTLSGVQPEDEAEYYCVLWYSNRWVFGGGTKLTVL

SEQ ID NO: 1047 - protein, 986 aa, Artificial Sequence
  Synthetic peptide
EVQLLESGGGLVQPGGSLRLSCAASGFTFSVYAMSWVRQAPGKGLEWVSTISGSGGSTFYAESVKGRFTISRDNSKNTLYLQMNRLRAEDTAVYYCARHDYSNYAYFDYWGQGTLVTVSSGGGGSGGGGSGGGGSEIVLTQSPGTLSLSPGERATLSCRASQSVRSSYLAWYQQKPGQAPRLLIYGASSRATGIPDRFSGSGSGTDFTLTISRLEPEDFAVYYCQQYGDLPFTFGPGTKVEIKSGGGGSEVQLVESGGGLVQPGGSLKLSCAASGFTFNKYAMNWVRQAPGKGLEWVARIRSKYNNYATYYADSVKDRFTISRDDSKNTAYLQMNNLKTEDTAVYYCVRHGNFGNSYISYWAYWGQGTLVTVSSGGGGSGGGGSGGGGSQTVVTQEPSLTVSPGGTVTLTCGSSTGAVTSGNYPNWVQQKPGQAPRGLIGGTKFLAPGTPARFSGSLLGGKAALTLSGVQPEDEAEYYCVLWYSNRWVFGGGTKLTVLGGGGDKTHTCPPCPAPELLGGPSVFLFPPKPKDTLMISRTPEVTCVVVDVSHEDPEVKFNWYVDGVEVHNAKTKPCEEQYGSTYRCVSVLTVLHQDWLNGKEYKCKVSNKALPAPIEKTISKAKGQPREPQVYTLPPSREEMTKNQVSLTCLVKGFYPSDIAVEWESNGQPENNYKTTPPVLDSDGSFFLYSKLTVDKSRWQQGNVFSCSVMHEALHNHYTQKSLSLSPGKGGGGSGGGGSGGGGSGGGGSGGGGSGGGGSDKTHTCPPCPAPELLGGPSVFLFPPKPKDTLMISRTPEVTCVVVDVSHEDPEVKFNWYVDGVEVHNAKTKPCEEQYGSTYRCVSVLTVLHQDWLNGKEYKCKVSNKALPAPIEKTISKAKGQPREPQVYTLPPSREEMTKNQVSLTCLVKGFYPSDIAVEWESNGQPENNYKTTPPVLDSDGSFFLYSKLTVDKSRWQQGNVFSCSVMHEALHNHYTQKSLSLSPGK

SEQ ID NO: 1048 - protein, 5 aa, Artificial Sequence
  Synthetic peptide
SYGMH

SEQ ID NO: 1049 - protein, 17 aa, Artificial Sequence
  Synthetic peptide
VISYEGSNKYYAESVKG

SEQ ID NO: 1050 - protein, 15 aa, Artificial Sequence
  Synthetic peptide
GRYYGSGNYNHGMDV

SEQ ID NO: 1051 - protein, 11 aa, Artificial Sequence
  Synthetic peptide
RASQSISSYLN

SEQ ID NO: 1052 - protein, 7 aa, Artificial Sequence
  Synthetic peptide
AASSLQS

SEQ ID NO: 1053 - protein, 9 aa, Artificial Sequence
  Synthetic peptide
QQSYSTPFT

SEQ ID NO: 1054 - protein, 124 aa, Artificial Sequence
  Synthetic peptide
QVQLVESGGGVVQPGRSLRLSCAASGFMFSSYGMHWVRQAPGKCLEWVAVISYEGSNKYYAESVKGRFTISRDNSKNTLYLQMNSLRAEDTAVYYCARGRYYGSGNYNHGMDVWGQGTTVTVSS

SEQ ID NO: 1055 - protein, 107 aa, Artificial Sequence
  Synthetic peptide
DIQMTQSPSSLSASVGDRVTITCRASQSISSYLNWYQQKPGKAPKLLIYAASSLQSGVPSRFSGRGSGTDFTLTISSLQPEDFATYYCQQSYSTPFTFGCGTKVEIK

SEQ ID NO: 1056 - protein, 246 aa, Artificial Sequence
  Synthetic peptide
QVQLVESGGGVVQPGRSLRLSCAASGFMFSSYGMHWVRQAPGKCLEWVAVISYEGSNKYYAESVKGRFTISRDNSKNTLYLQMNSLRAEDTAVYYCARGRYYGSGNYNHGMDVWGQGTTVTVSSGGGGSGGGGSGGGGSDIQMTQSPSSLSASVGDRVTITCRASQSISSYLNWYQQKPGKAPKLLIYAASSLQSGVPSRFSGRGSGTDFTLTISSLQPEDFATYYCQQSYSTPFTFGCGTKVEIK

SEQ ID NO: 1057 - protein, 501 aa, Artificial Sequence
  Synthetic peptide
QVQLVESGGGVVQPGRSLRLSCAASGFMFSSYGMHWVRQAPGKCLEWVAVISYEGSNKYYAESVKGRFTISRDNSKNTLYLQMNSLRAEDTAVYYCARGRYYGSGNYNHGMDVWGQGTTVTVSSGGGGSGGGGSGGGGSDIQMTQSPSSLSASVGDRVTITCRASQSISSYLNWYQQKPGKAPKLLIYAASSLQSGVPSRFSGRGSGTDFTLTISSLQPEDFATYYCQQSYSTPFTFGCGTKVEIKSGGGGSEVQLVESGGGLVQPGGSLKLSCAASGFTFNKYAMNWVRQAPGKGLEWVARIRSKYNNYATYYADSVKDRFTISRDDSKNTAYLQMNNLKTEDTAVYYCVRHGNFGNSYISYWAYWGQGTLVTVSSGGGGSGGGGSGGGGSQTVVTQEPSLTVSPGGTVTLTCGSSTGAVTSGNYPNWVQQKPGQAPRGLIGGTKFLAPGTPARFSGSLLGGKAALTLSGVQPEDEAEYYCVLWYSNRWVFGGGTKLTVL

SEQ ID NO: 1058 - protein, 989 aa, Artificial Sequence
  Synthetic peptide
QVQLVESGGGVVQPGRSLRLSCAASGFMFSSYGMHWVRQAPGKCLEWVAVISYEGSNKYYAESVKGRFTISRDNSKNTLYLQMNSLRAEDTAVYYCARGRYYGSGNYNHGMDVWGQGTTVTVSSGGGGSGGGGSGGGGSDIQMTQSPSSLSASVGDRVTITCRASQSISSYLNWYQQKPGKAPKLLIYAASSLQSGVPSRFSGRGSGTDFTLTISSLQPEDFATYYCQQSYSTPFTFGCGTKVEIKSGGGGSEVQLVESGGGLVQPGGSLKLSCAASGFTFNKYAMNWVRQAPGKGLEWVARIRSKYNNYATYYADSVKDRFTISRDDSKNTAYLQMNNLKTEDTAVYYCVRHGNFGNSYISYWAYWGQGTLVTVSSGGGGSGGGGSGGGGSQTVVTQEPSLTVSPGGTVTLTCGSSTGAVTSGNYPNWVQQKPGQAPRGLIGGTKFLAPGTPARFSGSLLGGKAALTLSGVQPEDEAEYYCVLWYSNRWVFGGGTKLTVLGGGGDKTHTCPPCPAPELLGGPSVFLFPPKPKDTLMISRTPEVTCVVVDVSHEDPEVKFNWYVDGVEVHNAKTKPCEEQYGSTYRCVSVLTVLHQDWLNGKEYKCKVSNKALPAPIEKTISKAKGQPREPQVYTLPPSREEMTKNQVSLTCLVKGFYPSDIAVEWESNGQPENNYKTTPPVLDSDGSFFLYSKLTVDKSRWQQGNVFSCSVMHEALHNHYTQKSLSLSPGKGGGGSGGGGSGGGGSGGGGSGGGGSGGGGSDKTHTCPPCPAPELLGGPSVFLFPPKPKDTLMISRTPEVTCVVVDVSHEDPEVKFNWYVDGVEVHNAKTKPCEEQYGSTYRCVSVLTVLHQDWLNGKEYKCKVSNKALPAPIEKTISKAKGQPREPQVYTLPPSREEMTKNQVSLTCLVKGFYPSDIAVEWESNGQPENNYKTTPPVLDSDGSFFLYSKLTVDKSRWQQGNVFSCSVMHEALHNHYTQKSLSLSPGK

SEQ ID NO: 1059 - protein, 124 aa, Artificial Sequence
  Synthetic peptide
QVQLVESGGGVVQPGRSLRLSCAASGFMFSSYGMHWVRQAPGKGLEWVAVISYEGSNKYYAESVKGRFTISRDNSKNTLYLQMNSLRAEDTAVYYCARGRYYGSGNYNHGMDVWGQGTTVTVSS

SEQ ID NO: 1060 - protein, 107 aa, Artificial Sequence
  Synthetic peptide
DIQMTQSPSSLSASVGDRVTITCRASQSISSYLNWYQQKPGKAPKLLIYAASSLQSGVPSRFSGRGSGTDFTLTISSLQPEDFATYYCQQSYSTPFTFGPGTKVEIK

SEQ ID NO: 1061 - protein, 246 aa, Artificial Sequence
  Synthetic peptide
QVQLVESGGGVVQPGRSLRLSCAASGFMFSSYGMHWVRQAPGKGLEWVAVISYEGSNKYYAESVKGRFTISRDNSKNTLYLQMNSLRAEDTAVYYCARGRYYGSGNYNHGMDVWGQGTTVTVSSGGGGSGGGGSGGGGSDIQMTQSPSSLSASVGDRVTITCRASQSISSYLNWYQQKPGKAPKLLIYAASSLQSGVPSRFSGRGSGTDFTLTISSLQPEDFATYYCQQSYSTPFTFGPGTKVEIK

SEQ ID NO: 1062 - protein, 501 aa, Artificial Sequence
  Synthetic peptide
QVQLVESGGGVVQPGRSLRLSCAASGFMFSSYGMHWVRQAPGKGLEWVAVISYEGSNKYYAESVKGRFTISRDNSKNTLYLQMNSLRAEDTAVYYCARGRYYGSGNYNHGMDVWGQGTTVTVSSGGGGSGGGGSGGGGSDIQMTQSPSSLSASVGDRVTITCRASQSISSYLNWYQQKPGKAPKLLIYAASSLQSGVPSRFSGRGSGTDFTLTISSLQPEDFATYYCQQSYSTPFTFGPGTKVEIKSGGGGSEVQLVESGGGLVQPGGSLKLSCAASGFTFNKYAMNWVRQAPGKGLEWVARIRSKYNNYATYYADSVKDRFTISRDDSKNTAYLQMNNLKTEDTAVYYCVRHGNFGNSYISYWAYWGQGTLVTVSSGGGGSGGGGSGGGGSQTVVTQEPSLTVSPGGTVTLTCGSSTGAVTSGNYPNWVQQKPGQAPRGLIGGTKFLAPGTPARFSGSLLGGKAALTLSGVQPEDEAEYYCVLWYSNRWVFGGGTKLTVL

SEQ ID NO: 1063 - protein, 989 aa, Artificial Sequence
  Synthetic peptide
QVQLVESGGGVVQPGRSLRLSCAASGFMFSSYGMHWVRQAPGKGLEWVAVISYEGSNKYYAESVKGRFTISRDNSKNTLYLQMNSLRAEDTAVYYCARGRYYGSGNYNHGMDVWGQGTTVTVSSGGGGSGGGGSGGGGSDIQMTQSPSSLSASVGDRVTITCRASQSISSYLNWYQQKPGKAPKLLIYAASSLQSGVPSRFSGRGSGTDFTLTISSLQPEDFATYYCQQSYSTPFTFGPGTKVEIKSGGGGSEVQLVESGGGLVQPGGSLKLSCAASGFTFNKYAMNWVRQAPGKGLEWVARIRSKYNNYATYYADSVKDRFTISRDDSKNTAYLQMNNLKTEDTAVYYCVRHGNFGNSYISYWAYWGQGTLVTVSSGGGGSGGGGSGGGGSQTVVTQEPSLTVSPGGTVTLTCGSSTGAVTSGNYPNWVQQKPGQAPRGLIGGTKFLAPGTPARFSGSLLGGKAALTLSGVQPEDEAEYYCVLWYSNRWVFGGGTKLTVLGGGGDKTHTCPPCPAPELLGGPSVFLFPPKPKDTLMISRTPEVTCVVVDVSHEDPEVKFNWYVDGVEVHNAKTKPCEEQYGSTYRCVSVLTVLHQDWLNGKEYKCKVSNKALPAPIEKTISKAKGQPREPQVYTLPPSREEMTKNQVSLTCLVKGFYPSDIAVEWESNGQPENNYKTTPPVLDSDGSFFLYSKLTVDKSRWQQGNVFSCSVMHEALHNHYTQKSLSLSPGKGGGGSGGGGSGGGGSGGGGSGGGGSGGGGSDKTHTCPPCPAPELLGGPSVFLFPPKPKDTLMISRTPEVTCVVVDVSHEDPEVKFNWYVDGVEVHNAKTKPCEEQYGSTYRCVSVLTVLHQDWLNGKEYKCKVSNKALPAPIEKTISKAKGQPREPQVYTLPPSREEMTKNQVSLTCLVKGFYPSDIAVEWESNGQPENNYKTTPPVLDSDGSFFLYSKLTVDKSRWQQGNVFSCSVMHEALHNHYTQKSLSLSPGK

SEQ ID NO: 1064 - protein, 5 aa, Artificial Sequence
  Synthetic peptide
SYGMH

SEQ ID NO: 1065 - protein, 17 aa, Artificial Sequence
  Synthetic peptide
VTWYDASNKYYGDAVKG

SEQ ID NO: 1066 - protein, 13 aa, Artificial Sequence
  Synthetic peptide
DLLRGVKGYAMDV

SEQ ID NO: 1067 - protein, 12 aa, Artificial Sequence
  Synthetic peptide
RASQSLRRIYLA

SEQ ID NO: 1068 - protein, 7 aa, Artificial Sequence
  Synthetic peptide
DVFDRAT

SEQ ID NO: 1069 - protein, 9 aa, Artificial Sequence
  Synthetic peptide
QQYSESPFT

SEQ ID NO: 1070 - protein, 122 aa, Artificial Sequence
  Synthetic peptide
QVQLVESGGGVVQPGRSLRLSCAASGFTFSSYGMHWVRQAPGKCLEWVAVTWYDASNKYYGDAVKGRFTISRDNSKNTLYLQMNSLRAEDTAVYYCARDLLRGVKGYAMDVWGQGTTVTVSS

SEQ ID NO: 1071 - protein, 108 aa, Artificial Sequence
  Synthetic peptide
EIVLTQSPGTLSLSPGERATLSCRASQSLRRIYLAWYQQKPGQAPRLLIYDVFDRATGIPDRFSGGGSGTDFTLTISRLEPEDFAVYYCQQYSESPFTFGCGTKVDIK

SEQ ID NO: 1072 - protein, 245 aa, Artificial Sequence
  Synthetic peptide
QVQLVESGGGVVQPGRSLRLSCAASGFTFSSYGMHWVRQAPGKCLEWVAVTWYDASNKYYGDAVKGRFTISRDNSKNTLYLQMNSLRAEDTAVYYCARDLLRGVKGYAMDVWGQGTTVTVSSGGGGSGGGGSGGGGSEIVLTQSPGTLSLSPGERATLSCRASQSLRRIYLAWYQQKPGQAPRLLIYDVFDRATGIPDRFSGGGSGTDFTLTISRLEPEDFAVYYCQQYSESPFTFGCGTKVDIK

SEQ ID NO: 1073 - protein, 500 aa, Artificial Sequence
  Synthetic peptide
QVQLVESGGGVVQPGRSLRLSCAASGFTFSSYGMHWVRQAPGKCLEWVAVTWYDASNKYYGDAVKGRFTISRDNSKNTLYLQMNSLRAEDTAVYYCARDLLRGVKGYAMDVWGQGTTVTVSSGGGGSGGGGSGGGGSEIVLTQSPGTLSLSPGERATLSCRASQSLRRIYLAWYQQKPGQAPRLLIYDVFDRATGIPDRFSGGGSGTDFTLTISRLEPEDFAVYYCQQYSESPFTFGCGTKVDIKSGGGGSEVQLVESGGGLVQPGGSLKLSCAASGFTFNKYAMNWVRQAPGKGLEWVARIRSKYNNYATYYADSVKDRFTISRDDSKNTAYLQMNNLKTEDTAVYYCVRHGNFGNSYISYWAYWGQGTLVTVSSGGGGSGGGGSGGGGSQTVVTQEPSLTVSPGGTVTLTCGSSTGAVTSGNYPNWVQQKPGQAPRGLIGGTKFLAPGTPARFSGSLLGGKAALTLSGVQPEDEAEYYCVLWYSNRWVFGGGTKLTVL

SEQ ID NO: 1074 - protein, 988 aa, Artificial Sequence
  Synthetic peptide
QVQLVESGGGVVQPGRSLRLSCAASGFTFSSYGMHWVRQAPGKCLEWVAVTWYDASNKYYGDAVKGRFTISRDNSKNTLYLQMNSLRAEDTAVYYCARDLLRGVKGYAMDVWGQGTTVTVSSGGGGSGGGGSGGGGSEIVLTQSPGTLSLSPGERATLSCRASQSLRRIYLAWYQQKPGQAPRLLIYDVFDRATGIPDRFSGGGSGTDFTLTISRLEPEDFAVYYCQQYSESPFTFGCGTKVDIKSGGGGSEVQLVESGGGLVQPGGSLKLSCAASGFTFNKYAMNWVRQAPGKGLEWVARIRSKYNNYATYYADSVKDRFTISRDDSKNTAYLQMNNLKTEDTAVYYCVRHGNFGNSYISYWAYWGQGTLVTVSSGGGGSGGGGSGGGGSQTVVTQEPSLTVSPGGTVTLTCGSSTGAVTSGNYPNWVQQKPGQAPRGLIGGTKFLAPGTPARFSGSLLGGKAALTLSGVQPEDEAEYYCVLWYSNRWVFGGGTKLTVLGGGGDKTHTCPPCPAPELLGGPSVFLFPPKPKDTLMISRTPEVTCVVVDVSHEDPEVKFNWYVDGVEVHNAKTKPCEEQYGSTYRCVSVLTVLHQDWLNGKEYKCKVSNKALPAPIEKTISKAKGQPREPQVYTLPPSREEMTKNQVSLTCLVKGFYPSDIAVEWESNGQPENNYKTTPPVLDSDGSFFLYSKLTVDKSRWQQGNVFSCSVMHEALHNHYTQKSLSLSPGKGGGGSGGGGSGGGGSGGGGSGGGGSGGGGSDKTHTCPPCPAPELLGGPSVFLFPPKPKDTLMISRTPEVTCVVVDVSHEDPEVKFNWYVDGVEVHNAKTKPCEEQYGSTYRCVSVLTVLHQDWLNGKEYKCKVSNKALPAPIEKTISKAKGQPREPQVYTLPPSREEMTKNQVSLTCLVKGFYPSDIAVEWESNGQPENNYKTTPPVLDSDGSFFLYSKLTVDKSRWQQGNVFSCSVMHEALHNHYTQKSLSLSPGK

SEQ ID NO: 1075 - protein, 122 aa, Artificial Sequence
  Synthetic peptide
QVQLVESGGGVVQPGRSLRLSCAASGFTFSSYGMHWVRQAPGKGLEWVAVTWYDASNKYYGDAVKGRFTISRDNSKNTLYLQMNSLRAEDTAVYYCARDLLRGVKGYAMDVWGQGTTVTVSS

SEQ ID NO: 1076 - protein, 108 aa, Artificial Sequence
  Synthetic peptide
EIVLTQSPGTLSLSPGERATLSCRASQSLRRIYLAWYQQKPGQAPRLLIYDVFDRATGIPDRFSGGGSGTDFTLTISRLEPEDFAVYYCQQYSESPFTFGPGTKVDIK

SEQ ID NO: 1077 - protein, 245 aa, Artificial Sequence
  Synthetic peptide
QVQLVESGGGVVQPGRSLRLSCAASGFTFSSYGMHWVRQAPGKGLEWVAVTWYDASNKYYGDAVKGRFTISRDNSKNTLYLQMNSLRAEDTAVYYCARDLLRGVKGYAMDVWGQGTTVTVSSGGGGSGGGGSGGGGSEIVLTQSPGTLSLSPGERATLSCRASQSLRRIYLAWYQQKPGQAPRLLIYDVFDRATGIPDRFSGGGSGTDFTLTISRLEPEDFAVYYCQQYSESPFTFGPGTKVDIK

SEQ ID NO: 1078 - protein, 500 aa, Artificial Sequence
  Synthetic peptide
QVQLVESGGGVVQPGRSLRLSCAASGFTFSSYGMHWVRQAPGKGLEWVAVTWYDASNKYYGDAVKGRFTISRDNSKNTLYLQMNSLRAEDTAVYYCARDLLRGVKGYAMDVWGQGTTVTVSSGGGGSGGGGSGGGGSEIVLTQSPGTLSLSPGERATLSCRASQSLRRIYLAWYQQKPGQAPRLLIYDVFDRATGIPDRFSGGGSGTDFTLTISRLEPEDFAVYYCQQYSESPFTFGPGTKVDIKSGGGGSEVQLVESGGGLVQPGGSLKLSCAASGFTFNKYAMNWVRQAPGKGLEWVARIRSKYNNYATYYADSVKDRFTISRDDSKNTAYLQMNNLKTEDTAVYYCVRHGNFGNSYISYWAYWGQGTLVTVSSGGGGSGGGGSGGGGSQTVVTQEPSLTVSPGGTVTLTCGSSTGAVTSGNYPNWVQQKPGQAPRGLIGGTKFLAPGTPARFSGSLLGGKAALTLSGVQPEDEAEYYCVLWYSNRWVFGGGTKLTVL

SEQ ID NO: 1079 - protein, 988 aa, Artificial Sequence
  Synthetic peptide
QVQLVESGGGVVQPGRSLRLSCAASGFTFSSYGMHWVRQAPGKGLEWVAVTWYDASNKYYGDAVKGRFTISRDNSKNTLYLQMNSLRAEDTAVYYCARDLLRGVKGYAMDVWGQGTTVTVSSGGGGSGGGGSGGGGSEIVLTQSPGTLSLSPGERATLSCRASQSLRRIYLAWYQQKPGQAPRLLIYDVFDRATGIPDRFSGGGSGTDFTLTISRLEPEDFAVYYCQQYSESPFTFGPGTKVDIKSGGGGSEVQLVESGGGLVQPGGSLKLSCAASGFTFNKYAMNWVRQAPGKGLEWVARIRSKYNNYATYYADSVKDRFTISRDDSKNTAYLQMNNLKTEDTAVYYCVRHGNFGNSYISYWAYWGQGTLVTVSSGGGGSGGGGSGGGGSQTVVTQEPSLTVSPGGTVTLTCGSSTGAVTSGNYPNWVQQKPGQAPRGLIGGTKFLAPGTPARFSGSLLGGKAALTLSGVQPEDEAEYYCVLWYSNRWVFGGGTKLTVLGGGGDKTHTCPPCPAPELLGGPSVFLFPPKPKDTLMISRTPEVTCVVVDVSHEDPEVKFNWYVDGVEVHNAKTKPCEEQYGSTYRCVSVLTVLHQDWLNGKEYKCKVSNKALPAPIEKTISKAKGQPREPQVYTLPPSREEMTKNQVSLTCLVKGFYPSDIAVEWESNGQPENNYKTTPPVLDSDGSFFLYSKLTVDKSRWQQGNVFSCSVMHEALHNHYTQKSLSLSPGKGGGGSGGGGSGGGGSGGGGSGGGGSGGGGSDKTHTCPPCPAPELLGGPSVFLFPPKPKDTLMISRTPEVTCVVVDVSHEDPEVKFNWYVDGVEVHNAKTKPCEEQYGSTYRCVSVLTVLHQDWLNGKEYKCKVSNKALPAPIEKTISKAKGQPREPQVYTLPPSREEMTKNQVSLTCLVKGFYPSDIAVEWESNGQPENNYKTTPPVLDSDGSFFLYSKLTVDKSRWQQGNVFSCSVMHEALHNHYTQKSLSLSPGK

SEQ ID NO: 1080 - protein, 5 aa, Artificial Sequence
  Synthetic peptide
SYGIS

SEQ ID NO: 1081 - protein, 17 aa, Artificial Sequence
  Synthetic peptide
WISAYQGYTHYAQKLQG

SEQ ID NO: 1082 - protein, 12 aa, Artificial Sequence
  Synthetic peptide
DYGGNDYYGMDV

SEQ ID NO: 1083 - protein, 13 aa, Artificial Sequence
  Synthetic peptide
SGSSSNIGINYVY

SEQ ID NO: 1084 - protein, 7 aa, Artificial Sequence
  Synthetic peptide
RSDQRPS

SEQ ID NO: 1085 - protein, 11 aa, Artificial Sequence
  Synthetic peptide
AAFDESLSGVV

SEQ ID NO: 1086 - protein, 121 aa, Artificial Sequence
  Synthetic peptide
QVQLVQSGAEVKKPGASVKVSCKASGYTFTSYGISWVRQAPGQCLEWMGWISAYQGYTHYAQKLQGRVTMTTDTSTSTAYMELRSLRSDDTAVYYCARDYGGNDYYGMDVWGQGTTVTVSS

SEQ ID NO: 1087 - protein, 110 aa, Artificial Sequence
  Synthetic peptide
QSVLTQPPSASGTPGQRVTISCSGSSSNIGINYVYWYQQLPGTAPKLLIYRSDQRPSGVPDRFSGSKSGTSASLALSGLRSEDEADYYCAAFDESLSGVVFGCGTKLTVL

SEQ ID NO: 1088 - protein, 246 aa, Artificial Sequence
  Synthetic peptide
QVQLVQSGAEVKKPGASVKVSCKASGYTFTSYGISWVRQAPGQCLEWMGWISAYQGYTHYAQKLQGRVTMTTDTSTSTAYMELRSLRSDDTAVYYCARDYGGNDYYGMDVWGQGTTVTVSSGGGGSGGGGSGGGGSQSVLTQPPSASGTPGQRVTISCSGSSSNIGINYVYWYQQLPGTAPKLLIYRSDQRPSGVPDRFSGSKSGTSASLALSGLRSEDEADYYCAAFDESLSGVVFGCGTKLTVL

SEQ ID NO: 1089 - protein, 501 aa, Artificial Sequence
  Synthetic peptide
QVQLVQSGAEVKKPGASVKVSCKASGYTFTSYGISWVRQAPGQCLEWMGWISAYQGYTHYAQKLQGRVTMTTDTSTSTAYMELRSLRSDDTAVYYCARDYGGNDYYGMDVWGQGTTVTVSSGGGGSGGGGSGGGGSQSVLTQPPSASGTPGQRVTISCSGSSSNIGINYVYWYQQLPGTAPKLLIYRSDQRPSGVPDRFSGSKSGTSASLALSGLRSEDEADYYCAAFDESLSGVVFGCGTKLTVLSGGGGSEVQLVESGGGLVQPGGSLKLSCAASGFTFNKYAMNWVRQAPGKGLEWVARIRSKYNNYATYYADSVKDRFTISRDDSKNTAYLQMNNLKTEDTAVYYCVRHGNFGNSYISYWAYWGQGTLVTVSSGGGGSGGGGSGGGGSQTVVTQEPSLTVSPGGTVTLTCGSSTGAVTSGNYPNWVQQKPGQAPRGLIGGTKFLAPGTPARFSGSLLGGKAALTLSGVQPEDEAEYYCVLWYSNRWVFGGGTKLTVL

SEQ ID NO: 1090 - protein, 989 aa, Artificial Sequence
  Synthetic peptide
QVQLVQSGAEVKKPGASVKVSCKASGYTFTSYGISWVRQAPGQCLEWMGWISAYQGYTHYAQKLQGRVTMTTDTSTSTAYMELRSLRSDDTAVYYCARDYGGNDYYGMDVWGQGTTVTVSSGGGGSGGGGSGGGGSQSVLTQPPSASGTPGQRVTISCSGSSSNIGINYVYWYQQLPGTAPKLLIYRSDQRPSGVPDRFSGSKSGTSASLALSGLRSEDEADYYCAAFDESLSGVVFGCGTKLTVLSGGGGSEVQLVESGGGLVQPGGSLKLSCAASGFTFNKYAMNWVRQAPGKGLEWVARIRSKYNNYATYYADSVKDRFTISRDDSKNTAYLQMNNLKTEDTAVYYCVRHGNFGNSYISYWAYWGQGTLVTVSSGGGGSGGGGSGGGGSQTVVTQEPSLTVSPGGTVTLTCGSSTGAVTSGNYPNWVQQKPGQAPRGLIGGTKFLAPGTPARFSGSLLGGKAALTLSGVQPEDEAEYYCVLWYSNRWVFGGGTKLTVLGGGGDKTHTCPPCPAPELLGGPSVFLFPPKPKDTLMISRTPEVTCVVVDVSHEDPEVKFNWYVDGVEVHNAKTKPCEEQYGSTYRCVSVLTVLHQDWLNGKEYKCKVSNKALPAPIEKTISKAKGQPREPQVYTLPPSREEMTKNQVSLTCLVKGFYPSDIAVEWESNGQPENNYKTTPPVLDSDGSFFLYSKLTVDKSRWQQGNVFSCSVMHEALHNHYTQKSLSLSPGKGGGGSGGGGSGGGGSGGGGSGGGGSGGGGSDKTHTCPPCPAPELLGGPSVFLFPPKPKDTLMISRTPEVTCVVVDVSHEDPEVKFNWYVDGVEVHNAKTKPCEEQYGSTYRCVSVLTVLHQDWLNGKEYKCKVSNKALPAPIEKTISKAKGQPREPQVYTLPPSREEMTKNQVSLTCLVKGFYPSDIAVEWESNGQPENNYKTTPPVLDSDGSFFLYSKLTVDKSRWQQGNVFSCSVMHEALHNHYTQKSLSLSPGK

SEQ ID NO: 1091 - protein, 121 aa, Artificial Sequence
  Synthetic peptide
QVQLVQSGAEVKKPGASVKVSCKASGYTFTSYGISWVRQAPGQGLEWMGWISAYQGYTHYAQKLQGRVTMTTDTSTSTAYMELRSLRSDDTAVYYCARDYGGNDYYGMDVWGQGTTVTVSS

SEQ ID NO: 1092 - protein, 110 aa, Artificial Sequence
  Synthetic peptide
QSVLTQPPSASGTPGQRVTISCSGSSSNIGINYVYWYQQLPGTAPKLLIYRSDQRPSGVPDRFSGSKSGTSASLALSGLRSEDEADYYCAAFDESLSGVVFGGGTKLTVL

SEQ ID NO: 1093 - protein, 246 aa, Artificial Sequence
  Synthetic peptide
QVQLVQSGAEVKKPGASVKVSCKASGYTFTSYGISWVRQAPGQGLEWMGWISAYQGYTHYAQKLQGRVTMTTDTSTSTAYMELRSLRSDDTAVYYCARDYGGNDYYGMDVWGQGTTVTVSSGGGGSGGGGSGGGGSQSVLTQPPSASGTPGQRVTISCSGSSSNIGINYVYWYQQLPGTAPKLLIYRSDQRPSGVPDRFSGSKSGTSASLALSGLRSEDEADYYCAAFDESLSGVVFGGGTKLTVL

SEQ ID NO: 1094 - protein, 501 aa, Artificial Sequence
  Synthetic peptide
QVQLVQSGAEVKKPGASVKVSCKASGYTFTSYGISWVRQAPGQGLEWMGWISAYQGYTHYAQKLQGRVTMTTDTSTSTAYMELRSLRSDDTAVYYCARDYGGNDYYGMDVWGQGTTVTVSSGGGGSGGGGSGGGGSQSVLTQPPSASGTPGQRVTISCSGSSSNIGINYVYWYQQLPGTAPKLLIYRSDQRPSGVPDRFSGSKSGTSASLALSGLRSEDEADYYCAAFDESLSGVVFGGGTKLTVLSGGGGSEVQLVESGGGLVQPGGSLKLSCAASGFTFNKYAMNWVRQAPGKGLEWVARIRSKYNNYATYYADSVKDRFTISRDDSKNTAYLQMNNLKTEDTAVYYCVRHGNFGNSYISYWAYWGQGTLVTVSSGGGGSGGGGSGGGGSQTVVTQEPSLTVSPGGTVTLTCGSSTGAVTSGNYPNWVQQKPGQAPRGLIGGTKFLAPGTPARFSGSLLGGKAALTLSGVQPEDEAEYYCVLWYSNRWVFGGGTKLTVL

SEQ ID NO: 1095 - protein, 989 aa, Artificial Sequence
  Synthetic peptide
QVQLVQSGAEVKKPGASVKVSCKASGYTFTSYGISWVRQAPGQGLEWMGWISAYQGYTHYAQKLQGRVTMTTDTSTSTAYMELRSLRSDDTAVYYCARDYGGNDYYGMDVWGQGTTVTVSSGGGGSGGGGSGGGGSQSVLTQPPSASGTPGQRVTISCSGSSSNIGINYVYWYQQLPGTAPKLLIYRSDQRPSGVPDRFSGSKSGTSASLALSGLRSEDEADYYCAAFDESLSGVVFGGGTKLTVLSGGGGSEVQLVESGGGLVQPGGSLKLSCAASGFTFNKYAMNWVRQAPGKGLEWVARIRSKYNNYATYYADSVKDRFTISRDDSKNTAYLQMNNLKTEDTAVYYCVRHGNFGNSYISYWAYWGQGTLVTVSSGGGGSGGGGSGGGGSQTVVTQEPSLTVSPGGTVTLTCGSSTGAVTSGNYPNWVQQKPGQAPRGLIGGTKFLAPGTPARFSGSLLGGKAALTLSGVQPEDEAEYYCVLWYSNRWVFGGGTKLTVLGGGGDKTHTCPPCPAPELLGGPSVFLFPPKPKDTLMISRTPEVTCVVVDVSHEDPEVKFNWYVDGVEVHNAKTKPCEEQYGSTYRCVSVLTVLHQDWLNGKEYKCKVSNKALPAPIEKTISKAKGQPREPQVYTLPPSREEMTKNQVSLTCLVKGFYPSDIAVEWESNGQPENNYKTTPPVLDSDGSFFLYSKLTVDKSRWQQGNVFSCSVMHEALHNHYTQKSLSLSPGKGGGGSGGGGSGGGGSGGGGSGGGGSGGGGSDKTHTCPPCPAPELLGGPSVFLFPPKPKDTLMISRTPEVTCVVVDVSHEDPEVKFNWYVDGVEVHNAKTKPCEEQYGSTYRCVSVLTVLHQDWLNGKEYKCKVSNKALPAPIEKTISKAKGQPREPQVYTLPPSREEMTKNQVSLTCLVKGFYPSDIAVEWESNGQPENNYKTTPPVLDSDGSFFLYSKLTVDKSRWQQGNVFSCSVMHEALHNHYTQKSLSLSPGK

SEQ ID NO: 1096 - protein, 5 aa, Artificial Sequence
  Synthetic peptide
YYGMH

SEQ ID NO: 1097 - protein, 17 aa, Artificial Sequence
  Synthetic peptide
VIWYDASNKYYADAVKG

SEQ ID NO: 1098 - protein, 12 aa, Artificial Sequence
  Synthetic peptide
DREMGSRGDFDY

SEQ ID NO: 1099 - protein, 11 aa, Artificial Sequence
  Synthetic peptide
RASQGINNYLA

SEQ ID NO: 1100 - protein, 7 aa, Artificial Sequence
  Synthetic peptide
AVSILQS

SEQ ID NO: 1101 - protein, 9 aa, Artificial Sequence
  Synthetic peptide
QQYNFYPFS

SEQ ID NO: 1102 - protein, 121 aa, Artificial Sequence
  Synthetic peptide
QAQLVESGGGVVQPGRSLRLSCAASGFTFSYYGMHWVRQAPGKCLEWVAVIWYDASNKYYADAVKGRFTISRDNSKNTLYLQMNSLRAEDTAVYYCARDREMGSRGDFDYWGQGTLVTVSS

SEQ ID NO: 1103 - protein, 107 aa, Artificial Sequence
  Synthetic peptide
DIQMTQSPSSLSASVGDRVTITCRASQGINNYLAWFQQKPGKAPKSLIYAVSILQSGVPSKFSGSGSGTDFTLTISNLQPEDFATYYCQQYNFYPFSFGCGTKVDIK

SEQ ID NO: 1104 - protein, 243 aa, Artificial Sequence
  Synthetic peptide
QAQLVESGGGVVQPGRSLRLSCAASGFTFSYYGMHWVRQAPGKCLEWVAVIWYDASNKYYADAVKGRFTISRDNSKNTLYLQMNSLRAEDTAVYYCARDREMGSRGDFDYWGQGTLVTVSSGGGGSGGGGSGGGGSDIQMTQSPSSLSASVGDRVTITCRASQGINNYLAWFQQKPGKAPKSLIYAVSILQSGVPSKFSGSGSGTDFTLTISNLQPEDFATYYCQQYNFYPFSFGCGTKVDIK

SEQ ID NO: 1105 - protein, 498 aa, Artificial Sequence
  Synthetic peptide
QAQLVESGGGVVQPGRSLRLSCAASGFTFSYYGMHWVRQAPGKCLEWVAVIWYDASNKYYADAVKGRFTISRDNSKNTLYLQMNSLRAEDTAVYYCARDREMGSRGDFDYWGQGTLVTVSSGGGGSGGGGSGGGGSDIQMTQSPSSLSASVGDRVTITCRASQGINNYLAWFQQKPGKAPKSLIYAVSILQSGVPSKFSGSGSGTDFTLTISNLQPEDFATYYCQQYNFYPFSFGCGTKVDIKSGGGGSEVQLVESGGGLVQPGGSLKLSCAASGFTFNKYAMNWVRQAPGKGLEWVARIRSKYNNYATYYADSVKDRFTISRDDSKNTAYLQMNNLKTEDTAVYYCVRHGNFGNSYISYWAYWGQGTLVTVSSGGGGSGGGGSGGGGSQTVVTQEPSLTVSPGGTVTLTCGSSTGAVTSGNYPNWVQQKPGQAPRGLIGGTKFLAPGTPARFSGSLLGGKAALTLSGVQPEDEAEYYCVLWYSNRWVFGGGTKLTVL

SEQ ID NO: 1106 - protein, 986 aa, Artificial Sequence
  Synthetic peptide
QAQLVESGGGVVQPGRSLRLSCAASGFTFSYYGMHWVRQAPGKCLEWVAVIWYDASNKYYADAVKGRFTISRDNSKNTLYLQMNSLRAEDTAVYYCARDREMGSRGDFDYWGQGTLVTVSSGGGGSGGGGSGGGGSDIQMTQSPSSLSASVGDRVTITCRASQGINNYLAWFQQKPGKAPKSLIYAVSILQSGVPSKFSGSGSGTDFTLTISNLQPEDFATYYCQQYNFYPFSFGCGTKVDIKSGGGGSEVQLVESGGGLVQPGGSLKLSCAASGFTFNKYAMNWVRQAPGKGLEWVARIRSKYNNYATYYADSVKDRFTISRDDSKNTAYLQMNNLKTEDTAVYYCVRHGNFGNSYISYWAYWGQGTLVTVSSGGGGSGGGGSGGGGSQTVVTQEPSLTVSPGGTVTLTCGSSTGAVTSGNYPNWVQQKPGQAPRGLIGGTKFLAPGTPARFSGSLLGGKAALTLSGVQPEDEAEYYCVLWYSNRWVFGGGTKLTVLGGGGDKTHTCPPCPAPELLGGPSVFLFPPKPKDTLMISRTPEVTCVVVDVSHEDPEVKFNWYVDGVEVHNAKTKPCEEQYGSTYRCVSVLTVLHQDWLNGKEYKCKVSNKALPAPIEKTISKAKGQPREPQVYTLPPSREEMTKNQVSLTCLVKGFYPSDIAVEWESNGQPENNYKTTPPVLDSDGSFFLYSKLTVDKSRWQQGNVFSCSVMHEALHNHYTQKSLSLSPGKGGGGSGGGGSGGGGSGGGGSGGGGSGGGGSDKTHTCPPCPAPELLGGPSVFLFPPKPKDTLMISRTPEVTCVVVDVSHEDPEVKFNWYVDGVEVHNAKTKPCEEQYGSTYRCVSVLTVLHQDWLNGKEYKCKVSNKALPAPIEKTISKAKGQPREPQVYTLPPSREEMTKNQVSLTCLVKGFYPSDIAVEWESNGQPENNYKTTPPVLDSDGSFFLYSKLTVDKSRWQQGNVFSCSVMHEALHNHYTQKSLSLSPGK

SEQ ID NO: 1107 - protein, 121 aa, Artificial Sequence
  Synthetic peptide
QAQLVESGGGVVQPGRSLRLSCAASGFTFSYYGMHWVRQAPGKGLEWVAVIWYDASNKYYADAVKGRFTISRDNSKNTLYLQMNSLRAEDTAVYYCARDREMGSRGDFDYWGQGTLVTVSS

SEQ ID NO: 1108 - protein, 107 aa, Artificial Sequence
  Synthetic peptide
DIQMTQSPSSLSASVGDRVTITCRASQGINNYLAWFQQKPGKAPKSLIYAVSILQSGVPSKFSGSGSGTDFTLTISNLQPEDFATYYCQQYNFYPFSFGQGTKVDIK

SEQ ID NO: 1109 - protein, 243 aa, Artificial Sequence
  Synthetic peptide
QAQLVESGGGVVQPGRSLRLSCAASGFTFSYYGMHWVRQAPGKGLEWVAVIWYDASNKYYADAVKGRFTISRDNSKNTLYLQMNSLRAEDTAVYYCARDREMGSRGDFDYWGQGTLVTVSSGGGGSGGGGSGGGGSDIQMTQSPSSLSASVGDRVTITCRASQGINNYLAWFQQKPGKAPKSLIYAVSILQSGVPSKFSGSGSGTDFTLTISNLQPEDFATYYCQQYNFYPFSFGQGTKVDIK

SEQ ID NO: 1110 - protein, 498 aa, Artificial Sequence
  Synthetic peptide
QAQLVESGGGVVQPGRSLRLSCAASGFTFSYYGMHWVRQAPGKGLEWVAVIWYDASNKYYADAVKGRFTISRDNSKNTLYLQMNSLRAEDTAVYYCARDREMGSRGDFDYWGQGTLVTVSSGGGGSGGGGSGGGGSDIQMTQSPSSLSASVGDRVTITCRASQGINNYLAWFQQKPGKAPKSLIYAVSILQSGVPSKFSGSGSGTDFTLTISNLQPEDFATYYCQQYNFYPFSFGQGTKVDIKSGGGGSEVQLVESGGGLVQPGGSLKLSCAASGFTFNKYAMNWVRQAPGKGLEWVARIRSKYNNYATYYADSVKDRFTISRDDSKNTAYLQMNNLKTEDTAVYYCVRHGNFGNSYISYWAYWGQGTLVTVSSGGGGSGGGGSGGGGSQTVVTQEPSLTVSPGGTVTLTCGSSTGAVTSGNYPNWVQQKPGQAPRGLIGGTKFLAPGTPARFSGSLLGGKAALTLSGVQPEDEAEYYCVLWYSNRWVFGGGTKLTVL

SEQ ID NO: 1111 - protein, 986 aa, Artificial Sequence
  Synthetic peptide
QAQLVESGGGVVQPGRSLRLSCAASGFTFSYYGMHWVRQAPGKGLEWVAVIWYDASNKYYADAVKGRFTISRDNSKNTLYLQMNSLRAEDTAVYYCARDREMGSRGDFDYWGQGTLVTVSSGGGGSGGGGSGGGGSDIQMTQSPSSLSASVGDRVTITCRASQGINNYLAWFQQKPGKAPKSLIYAVSILQSGVPSKFSGSGSGTDFTLTISNLQPEDFATYYCQQYNFYPFSFGQGTKVDIKSGGGGSEVQLVESGGGLVQPGGSLKLSCAASGFTFNKYAMNWVRQAPGKGLEWVARIRSKYNNYATYYADSVKDRFTISRDDSKNTAYLQMNNLKTEDTAVYYCVRHGNFGNSYISYWAYWGQGTLVTVSSGGGGSGGGGSGGGGSQTVVTQEPSLTVSPGGTVTLTCGSSTGAVTSGNYPNWVQQKPGQAPRGLIGGTKFLAPGTPARFSGSLLGGKAALTLSGVQPEDEAEYYCVLWYSNRWVFGGGTKLTVLGGGGDKTHTCPPCPAPELLGGPSVFLFPPKPKDTLMISRTPEVTCVVVDVSHEDPEVKFNWYVDGVEVHNAKTKPCEEQYGSTYRCVSVLTVLHQDWLNGKEYKCKVSNKALPAPIEKTISKAKGQPREPQVYTLPPSREEMTKNQVSLTCLVKGFYPSDIAVEWESNGQPENNYKTTPPVLDSDGSFFLYSKLTVDKSRWQQGNVFSCSVMHEALHNHYTQKSLSLSPGKGGGGSGGGGSGGGGSGGGGSGGGGSGGGGSDKTHTCPPCPAPELLGGPSVFLFPPKPKDTLMISRTPEVTCVVVDVSHEDPEVKFNWYVDGVEVHNAKTKPCEEQYGSTYRCVSVLTVLHQDWLNGKEYKCKVSNKALPAPIEKTISKAKGQPREPQVYTLPPSREEMTKNQVSLTCLVKGFYPSDIAVEWESNGQPENNYKTTPPVLDSDGSFFLYSKLTVDKSRWQQGNVFSCSVMHEALHNHYTQKSLSLSPGK

SEQ ID NO: 1112 - protein, 5 aa, Artificial Sequence
  Synthetic peptide
GFYWS

SEQ ID NO: 1113 - protein, 16 aa, Artificial Sequence
  Synthetic peptide
EIYHSGHATNNPSLKS

SEQ ID NO: 1114 - protein, 10 aa, Artificial Sequence
  Synthetic peptide
GGNSGYIFDY

SEQ ID NO: 1115 - protein, 11 aa, Artificial Sequence
  Synthetic peptide
RTSQYIGRYLN

SEQ ID NO: 1116 - protein, 7 aa, Artificial Sequence
  Synthetic peptide
GASTLQQ

SEQ ID NO: 1117 - protein, 9 aa, Artificial Sequence
  Synthetic peptide
QQTYSTPRT

SEQ ID NO: 1118 - protein, 118 aa, Artificial Sequence
  Synthetic peptide
QVQLQQWGAGLLKPSETLSLTCAVYGGSFSGFYWSWIRQPPGKCLEWIGEIYHSGHATNNPSLKSRVTISLDTSKNQFSLKLNSVTAADTAVYYCARGGNSGYIFDYWGQGTLVTVSS

SEQ ID NO: 1119 - protein, 107 aa, Artificial Sequence
  Synthetic peptide
DVQMTQSPSSLSASVGDRVTITCRTSQYIGRYLNWYQQKPGKAPKVLIYGASTLQQGVPSRFSGSGSGTDFTLTITSLQPEDFASYYCQQTYSTPRTFGCGTKVEIK

SEQ ID NO: 1120 - protein, 240 aa, Artificial Sequence
  Synthetic peptide
QVQLQQWGAGLLKPSETLSLTCAVYGGSFSGFYWSWIRQPPGKCLEWIGEIYHSGHATNNPSLKSRVTISLDTSKNQFSLKLNSVTAADTAVYYCARGGNSGYIFDYWGQGTLVTVSSGGGGSGGGGSGGGGSDVQMTQSPSSLSASVGDRVTITCRTSQYIGRYLNWYQQKPGKAPKVLIYGASTLQQGVPSRFSGSGSGTDFTLTITSLQPEDFASYYCQQTYSTPRTFGCGTKVEIK

SEQ ID NO: 1121 - protein, 495 aa, Artificial Sequence
  Synthetic peptide
QVQLQQWGAGLLKPSETLSLTCAVYGGSFSGFYWSWIRQPPGKCLEWIGEIYHSGHATNNPSLKSRVTISLDTSKNQFSLKLNSVTAADTAVYYCARGGNSGYIFDYWGQGTLVTVSSGGGGSGGGGSGGGGSDVQMTQSPSSLSASVGDRVTITCRTSQYIGRYLNWYQQKPGKAPKVLIYGASTLQQGVPSRFSGSGSGTDFTLTITSLQPEDFASYYCQQTYSTPRTFGCGTKVEIKSGGGGSEVQLVESGGGLVQPGGSLKLSCAASGFTFNKYAMNWVRQAPGKGLEWVARIRSKYNNYATYYADSVKDRFTISRDDSKNTAYLQMNNLKTEDTAVYYCVRHGNFGNSYISYWAYWGQGTLVTVSSGGGGSGGGGSGGGGSQTVVTQEPSLTVSPGGTVTLTCGSSTGAVTSGNYPNWVQQKPGQAPRGLIGGTKFLAPGTPARFSGSLLGGKAALTLSGVQPEDEAEYYCVLWYSNRWVFGGGTKLTVL

SEQ ID NO: 1122 - protein, 983 aa, Artificial Sequence
  Synthetic peptide
QVQLQQWGAGLLKPSETLSLTCAVYGGSFSGFYWSWIRQPPGKCLEWIGEIYHSGHATNNPSLKSRVTISLDTSKNQFSLKLNSVTAADTAVYYCARGGNSGYIFDYWGQGTLVTVSSGGGGSGGGGSGGGGSDVQMTQSPSSLSASVGDRVTITCRTSQYIGRYLNWYQQKPGKAPKVLIYGASTLQQGVPSRFSGSGSGTDFTLTITSLQPEDFASYYCQQTYSTPRTFGCGTKVEIKSGGGGSEVQLVESGGGLVQPGGSLKLSCAASGFTFNKYAMNWVRQAPGKGLEWVARIRSKYNNYATYYADSVKDRFTISRDDSKNTAYLQMNNLKTEDTAVYYCVRHGNFGNSYISYWAYWGQGTLVTVSSGGGGSGGGGSGGGGSQTVVTQEPSLTVSPGGTVTLTCGSSTGAVTSGNYPNWVQQKPGQAPRGLIGGTKFLAPGTPARFSGSLLGGKAALTLSGVQPEDEAEYYCVLWYSNRWVFGGGTKLTVLGGGGDKTHTCPPCPAPELLGGPSVFLFPPKPKDTLMISRTPEVTCVVVDVSHEDPEVKFNWYVDGVEVHNAKTKPCEEQYGSTYRCVSVLTVLHQDWLNGKEYKCKVSNKALPAPIEKTISKAKGQPREPQVYTLPPSREEMTKNQVSLTCLVKGFYPSDIAVEWESNGQPENNYKTTPPVLDSDGSFFLYSKLTVDKSRWQQGNVFSCSVMHEALHNHYTQKSLSLSPGKGGGGSGGGGSGGGGSGGGGSGGGGSGGGGSDKTHTCPPCPAPELLGGPSVFLFPPKPKDTLMISRTPEVTCVVVDVSHEDPEVKFNWYVDGVEVHNAKTKPCEEQYGSTYRCVSVLTVLHQDWLNGKEYKCKVSNKALPAPIEKTISKAKGQPREPQVYTLPPSREEMTKNQVSLTCLVKGFYPSDIAVEWESNGQPENNYKTTPPVLDSDGSFFLYSKLTVDKSRWQQGNVFSCSVMHEALHNHYTQKSLSLSPGK

SEQ ID NO: 1123 - protein, 118 aa, Artificial Sequence
  Synthetic peptide
QVQLQQWGAGLLKPSETLSLTCAVYGGSFSGFYWSWIRQPPGKGLEWIGEIYHSGHATNNPSLKSRVTISLDTSKNQFSLKLNSVTAADTAVYYCARGGNSGYIFDYWGQGTLVTVSS

SEQ ID NO: 1124 - protein, 107 aa, Artificial Sequence
  Synthetic peptide
DVQMTQSPSSLSASVGDRVTITCRTSQYIGRYLNWYQQKPGKAPKVLIYGASTLQQGVPSRFSGSGSGTDFTLTITSLQPEDFASYYCQQTYSTPRTFGQGTKVEIK

SEQ ID NO: 1125 - protein, 240 aa, Artificial Sequence
  Synthetic peptide
QVQLQQWGAGLLKPSETLSLTCAVYGGSFSGFYWSWIRQPPGKGLEWIGEIYHSGHATNNPSLKSRVTISLDTSKNQFSLKLNSVTAADTAVYYCARGGNSGYIFDYWGQGTLVTVSSGGGGSGGGGSGGGGSDVQMTQSPSSLSASVGDRVTITCRTSQYIGRYLNWYQQKPGKAPKVLIYGASTLQQGVPSRFSGSGSGTDFTLTITSLQPEDFASYYCQQTYSTPRTFGQGTKVEIK

SEQ ID NO: 1126 - protein, 495 aa, Artificial Sequence
  Synthetic peptide
QVQLQQWGAGLLKPSETLSLTCAVYGGSFSGFYWSWIRQPPGKGLEWIGEIYHSGHATNNPSLKSRVTISLDTSKNQFSLKLNSVTAADTAVYYCARGGNSGYIFDYWGQGTLVTVSSGGGGSGGGGSGGGGSDVQMTQSPSSLSASVGDRVTITCRTSQYIGRYLNWYQQKPGKAPKVLIYGASTLQQGVPSRFSGSGSGTDFTLTITSLQPEDFASYYCQQTYSTPRTFGQGTKVEIKSGGGGSEVQLVESGGGLVQPGGSLKLSCAASGFTFNKYAMNWVRQAPGKGLEWVARIRSKYNNYATYYADSVKDRFTISRDDSKNTAYLQMNNLKTEDTAVYYCVRHGNFGNSYISYWAYWGQGTLVTVSSGGGGSGGGGSGGGGSQTVVTQEPSLTVSPGGTVTLTCGSSTGAVTSGNYPNWVQQKPGQAPRGLIGGTKFLAPGTPARFSGSLLGGKAALTLSGVQPEDEAEYYCVLWYSNRWVFGGGTKLTVL

SEQ ID NO: 1127 - protein, 983 aa, Artificial Sequence
  Synthetic peptide
QVQLQQWGAGLLKPSETLSLTCAVYGGSFSGFYWSWIRQPPGKGLEWIGEIYHSGHATNNPSLKSRVTISLDTSKNQFSLKLNSVTAADTAVYYCARGGNSGYIFDYWGQGTLVTVSSGGGGSGGGGSGGGGSDVQMTQSPSSLSASVGDRVTITCRTSQYIGRYLNWYQQKPGKAPKVLIYGASTLQQGVPSRFSGSGSGTDFTLTITSLQPEDFASYYCQQTYSTPRTFGQGTKVEIKSGGGGSEVQLVESGGGLVQPGGSLKLSCAASGFTFNKYAMNWVRQAPGKGLEWVARIRSKYNNYATYYADSVKDRFTISRDDSKNTAYLQMNNLKTEDTAVYYCVRHGNFGNSYISYWAYWGQGTLVTVSSGGGGSGGGGSGGGGSQTVVTQEPSLTVSPGGTVTLTCGSSTGAVTSGNYPNWVQQKPGQAPRGLIGGTKFLAPGTPARFSGSLLGGKAALTLSGVQPEDEAEYYCVLWYSNRWVFGGGTKLTVLGGGGDKTHTCPPCPAPELLGGPSVFLFPPKPKDTLMISRTPEVTCVVVDVSHEDPEVKFNWYVDGVEVHNAKTKPCEEQYGSTYRCVSVLTVLHQDWLNGKEYKCKVSNKALPAPIEKTISKAKGQPREPQVYTLPPSREEMTKNQVSLTCLVKGFYPSDIAVEWESNGQPENNYKTTPPVLDSDGSFFLYSKLTVDKSRWQQGNVFSCSVMHEALHNHYTQKSLSLSPGKGGGGSGGGGSGGGGSGGGGSGGGGSGGGGSDKTHTCPPCPAPELLGGPSVFLFPPKPKDTLMISRTPEVTCVVVDVSHEDPEVKFNWYVDGVEVHNAKTKPCEEQYGSTYRCVSVLTVLHQDWLNGKEYKCKVSNKALPAPIEKTISKAKGQPREPQVYTLPPSREEMTKNQVSLTCLVKGFYPSDIAVEWESNGQPENNYKTTPPVLDSDGSFFLYSKLTVDKSRWQQGNVFSCSVMHEALHNHYTQKSLSLSPGK

SEQ ID NO: 1128 - protein, 5 aa, Artificial Sequence
  Synthetic peptide
TYGMH

SEQ ID NO: 1129 - protein, 17 aa, Artificial Sequence
  Synthetic peptide
VIWYEGSNKYYGESVKG

SEQ ID NO: 1130 - protein, 11 aa, Artificial Sequence
  Synthetic peptide
DNSHYYYGMDV

SEQ ID NO: 1131 - protein, 14 aa, Artificial Sequence
  Synthetic peptide
TGSSSNIGAGYDVN

SEQ ID NO: 1132 - protein, 7 aa, Artificial Sequence
  Synthetic peptide
VNNNRPS

SEQ ID NO: 1133 - protein, 11 aa, Artificial Sequence
  Synthetic peptide
QSYDTSLSASV

SEQ ID NO: 1134 - protein, 120 aa, Artificial Sequence
  Synthetic peptide
QVQLVESGGGVVQPGRSLRLSCAASGFTFSTYGMHWVRQAPGKCLEWVAVIWYEGSNKYYGESVKGRFTISRDNSKNTLYLQMNSLRAEDTAVYYCARDNSHYYYGMDVWGQGTTVTVSS

SEQ ID NO: 1135 - protein, 111 aa, Artificial Sequence
  Synthetic peptide
QSVLTQPPSVSGAPGQRVTISCTGSSSNIGAGYDVNWYQQFPGTAPKLLIYVNNNRPSGVPDRFSGSTSGTSASLAITGLQAEDEADYYCQSYDTSLSASVFGCGTRLTVL

SEQ ID NO: 1136 - protein, 246 aa, Artificial Sequence
  Synthetic peptide
QVQLVESGGGVVQPGRSLRLSCAASGFTFSTYGMHWVRQAPGKCLEWVAVIWYEGSNKYYGESVKGRFTISRDNSKNTLYLQMNSLRAEDTAVYYCARDNSHYYYGMDVWGQGTTVTVSSGGGGSGGGGSGGGGSQSVLTQPPSVSGAPGQRVTISCTGSSSNIGAGYDVNWYQQFPGTAPKLLIYVNNNRPSGVPDRFSGSTSGTSASLAITGLQAEDEADYYCQSYDTSLSASVFGCGTRLTVL

SEQ ID NO: 1137 - protein, 501 aa, Artificial Sequence
  Synthetic peptide
QVQLVESGGGVVQPGRSLRLSCAASGFTFSTYGMHWVRQAPGKCLEWVAVIWYEGSNKYYGESVKGRFTISRDNSKNTLYLQMNSLRAEDTAVYYCARDNSHYYYGMDVWGQGTTVTVSSGGGGSGGGGSGGGGSQSVLTQPPSVSGAPGQRVTISCTGSSSNIGAGYDVNWYQQFPGTAPKLLIYVNNNRPSGVPDRFSGSTSGTSASLAITGLQAEDEADYYCQSYDTSLSASVFGCGTRLTVLSGGGGSEVQLVESGGGLVQPGGSLKLSCAASGFTFNKYAMNWVRQAPGKGLEWVARIRSKYNNYATYYADSVKDRFTISRDDSKNTAYLQMNNLKTEDTAVYYCVRHGNFGNSYISYWAYWGQGTLVTVSSGGGGSGGGGSGGGGSQTVVTQEPSLTVSPGGTVTLTCGSSTGAVTSGNYPNWVQQKPGQAPRGLIGGTKFLAPGTPARFSGSLLGGKAALTLSGVQPEDEAEYYCVLWYSNRWVFGGGTKLTVL

SEQ ID NO: 1138 - protein, 989 aa, Artificial Sequence
  Synthetic peptide
QVQLVESGGGVVQPGRSLRLSCAASGFTFSTYGMHWVRQAPGKCLEWVAVIWYEGSNKYYGESVKGRFTISRDNSKNTLYLQMNSLRAEDTAVYYCARDNSHYYYGMDVWGQGTTVTVSSGGGGSGGGGSGGGGSQSVLTQPPSVSGAPGQRVTISCTGSSSNIGAGYDVNWYQQFPGTAPKLLIYVNNNRPSGVPDRFSGSTSGTSASLAITGLQAEDEADYYCQSYDTSLSASVFGCGTRLTVLSGGGGSEVQLVESGGGLVQPGGSLKLSCAASGFTFNKYAMNWVRQAPGKGLEWVARIRSKYNNYATYYADSVKDRFTISRDDSKNTAYLQMNNLKTEDTAVYYCVRHGNFGNSYISYWAYWGQGTLVTVSSGGGGSGGGGSGGGGSQTVVTQEPSLTVSPGGTVTLTCGSSTGAVTSGNYPNWVQQKPGQAPRGLIGGTKFLAPGTPARFSGSLLGGKAALTLSGVQPEDEAEYYCVLWYSNRWVFGGGTKLTVLGGGGDKTHTCPPCPAPELLGGPSVFLFPPKPKDTLMISRTPEVTCVVVDVSHEDPEVKFNWYVDGVEVHNAKTKPCEEQYGSTYRCVSVLTVLHQDWLNGKEYKCKVSNKALPAPIEKTISKAKGQPREPQVYTLPPSREEMTKNQVSLTCLVKGFYPSDIAVEWESNGQPENNYKTTPPVLDSDGSFFLYSKLTVDKSRWQQGNVFSCSVMHEALHNHYTQKSLSLSPGKGGGGSGGGGSGGGGSGGGGSGGGGSGGGGSDKTHTCPPCPAPELLGGPSVFLFPPKPKDTLMISRTPEVTCVVVDVSHEDPEVKFNWYVDGVEVHNAKTKPCEEQYGSTYRCVSVLTVLHQDWLNGKEYKCKVSNKALPAPIEKTISKAKGQPREPQVYTLPPSREEMTKNQVSLTCLVKGFYPSDIAVEWESNGQPENNYKTTPPVLDSDGSFFLYSKLTVDKSRWQQGNVFSCSVMHEALHNHYTQKSLSLSPGK

SEQ ID NO: 1139 - protein, 120 aa, Artificial Sequence
  Synthetic peptide
QVQLVESGGGVVQPGRSLRLSCAASGFTFSTYGMHWVRQAPGKGLEWVAVIWYEGSNKYYGESVKGRFTISRDNSKNTLYLQMNSLRAEDTAVYYCARDNSHYYYGMDVWGQGTTVTVSS

SEQ ID NO: 1140 - protein, 111 aa, Artificial Sequence
  Synthetic peptide
QSVLTQPPSVSGAPGQRVTISCTGSSSNIGAGYDVNWYQQFPGTAPKLLIYVNNNRPSGVPDRFSGSTSGTSASLAITGLQAEDEADYYCQSYDTSLSASVFGGGTRLTVL

SEQ ID NO: 1141 - protein, 246 aa, Artificial Sequence
  Synthetic peptide
QVQLVESGGGVVQPGRSLRLSCAASGFTFSTYGMHWVRQAPGKGLEWVAVIWYEGSNKYYGESVKGRFTISRDNSKNTLYLQMNSLRAEDTAVYYCARDNSHYYYGMDVWGQGTTVTVSSGGGGSGGGGSGGGGSQSVLTQPPSVSGAPGQRVTISCTGSSSNIGAGYDVNWYQQFPGTAPKLLIYVNNNRPSGVPDRFSGSTSGTSASLAITGLQAEDEADYYCQSYDTSLSASVFGGGTRLTVL

SEQ ID NO: 1142 - protein, 501 aa, Artificial Sequence
  Synthetic peptide
QVQLVESGGGVVQPGRSLRLSCAASGFTFSTYGMHWVRQAPGKGLEWVAVIWYEGSNKYYGESVKGRFTISRDNSKNTLYLQMNSLRAEDTAVYYCARDNSHYYYGMDVWGQGTTVTVSSGGGGSGGGGSGGGGSQSVLTQPPSVSGAPGQRVTISCTGSSSNIGAGYDVNWYQQFPGTAPKLLIYVNNNRPSGVPDRFSGSTSGTSASLAITGLQAEDEADYYCQSYDTSLSASVFGGGTRLTVLSGGGGSEVQLVESGGGLVQPGGSLKLSCAASGFTFNKYAMNWVRQAPGKGLEWVARIRSKYNNYATYYADSVKDRFTISRDDSKNTAYLQMNNLKTEDTAVYYCVRHGNFGNSYISYWAYWGQGTLVTVSSGGGGSGGGGSGGGGSQTVVTQEPSLTVSPGGTVTLTCGSSTGAVTSGNYPNWVQQKPGQAPRGLIGGTKFLAPGTPARFSGSLLGGKAALTLSGVQPEDEAEYYCVLWYSNRWVFGGGTKLTVL

SEQ ID NO: 1143 - protein, 989 aa, Artificial Sequence
  Synthetic peptide
QVQLVESGGGVVQPGRSLRLSCAASGFTFSTYGMHWVRQAPGKGLEWVAVIWYEGSNKYYGESVKGRFTISRDNSKNTLYLQMNSLRAEDTAVYYCARDNSHYYYGMDVWGQGTTVTVSSGGGGSGGGGSGGGGSQSVLTQPPSVSGAPGQRVTISCTGSSSNIGAGYDVNWYQQFPGTAPKLLIYVNNNRPSGVPDRFSGSTSGTSASLAITGLQAEDEADYYCQSYDTSLSASVFGGGTRLTVLSGGGGSEVQLVESGGGLVQPGGSLKLSCAASGFTFNKYAMNWVRQAPGKGLEWVARIRSKYNNYATYYADSVKDRFTISRDDSKNTAYLQMNNLKTEDTAVYYCVRHGNFGNSYISYWAYWGQGTLVTVSSGGGGSGGGGSGGGGSQTVVTQEPSLTVSPGGTVTLTCGSSTGAVTSGNYPNWVQQKPGQAPRGLIGGTKFLAPGTPARFSGSLLGGKAALTLSGVQPEDEAEYYCVLWYSNRWVFGGGTKLTVLGGGGDKTHTCPPCPAPELLGGPSVFLFPPKPKDTLMISRTPEVTCVVVDVSHEDPEVKFNWYVDGVEVHNAKTKPCEEQYGSTYRCVSVLTVLHQDWLNGKEYKCKVSNKALPAPIEKTISKAKGQPREPQVYTLPPSREEMTKNQVSLTCLVKGFYPSDIAVEWESNGQPENNYKTTPPVLDSDGSFFLYSKLTVDKSRWQQGNVFSCSVMHEALHNHYTQKSLSLSPGKGGGGSGGGGSGGGGSGGGGSGGGGSGGGGSDKTHTCPPCPAPELLGGPSVFLFPPKPKDTLMISRTPEVTCVVVDVSHEDPEVKFNWYVDGVEVHNAKTKPCEEQYGSTYRCVSVLTVLHQDWLNGKEYKCKVSNKALPAPIEKTISKAKGQPREPQVYTLPPSREEMTKNQVSLTCLVKGFYPSDIAVEWESNGQPENNYKTTPPVLDSDGSFFLYSKLTVDKSRWQQGNVFSCSVMHEALHNHYTQKSLSLSPGK

SEQ ID NO: 1144 - protein, 5 aa, Artificial Sequence
  Synthetic peptide
TYGMH

SEQ ID NO: 1145 - protein, 17 aa, Artificial Sequence
  Synthetic peptide
VIWYEGSNKYYGESVKG

SEQ ID NO: 1146 - protein, 11 aa, Artificial Sequence
  Synthetic peptide
DNSHYYYGMDV

SEQ ID NO: 1147 - protein, 14 aa, Artificial Sequence
  Synthetic peptide
TGSSSNIGAGYDVN

SEQ ID NO: 1148 - protein, 7 aa, Artificial Sequence
  Synthetic peptide
VNNNRPS

SEQ ID NO: 1149 - protein, 11 aa, Artificial Sequence
  Synthetic peptide
QSYETSLSASV

SEQ ID NO: 1150 - protein, 120 aa, Artificial Sequence
  Synthetic peptide
QVQLVESGGGVVQPGRSLRLSCAASGFTFSTYGMHWVRQAPGKCLEWVAVIWYEGSNKYYGESVKGRFTISRDNSKNTLYLQMNSLRAEDTAVYYCARDNSHYYYGMDVWGQGTLVTVSS

SEQ ID NO: 1151 - protein, 111 aa, Artificial Sequence
  Synthetic peptide
QSVLTQPPSVSGAPGQRVTISCTGSSSNIGAGYDVNWYQQLPGTAPKLLIYVNNNRPSGVPDRFSGSKSGTSASLAITGLQAEDEADYYCQSYETSLSASVFGCGTRLTVL

SEQ ID NO: 1152 - protein, 246 aa, Artificial Sequence
  Synthetic peptide
QVQLVESGGGVVQPGRSLRLSCAASGFTFSTYGMHWVRQAPGKCLEWVAVIWYEGSNKYYGESVKGRFTISRDNSKNTLYLQMNSLRAEDTAVYYCARDNSHYYYGMDVWGQGTLVTVSSGGGGSGGGGSGGGGSQSVLTQPPSVSGAPGQRVTISCTGSSSNIGAGYDVNWYQQLPGTAPKLLIYVNNNRPSGVPDRFSGSKSGTSASLAITGLQAEDEADYYCQSYETSLSASVFGCGTRLTVL

SEQ ID NO: 1153 - protein, 501 aa, Artificial Sequence
  Synthetic peptide
QVQLVESGGGVVQPGRSLRLSCAASGFTFSTYGMHWVRQAPGKCLEWVAVIWYEGSNKYYGESVKGRFTISRDNSKNTLYLQMNSLRAEDTAVYYCARDNSHYYYGMDVWGQGTLVTVSSGGGGSGGGGSGGGGSQSVLTQPPSVSGAPGQRVTISCTGSSSNIGAGYDVNWYQQLPGTAPKLLIYVNNNRPSGVPDRFSGSKSGTSASLAITGLQAEDEADYYCQSYETSLSASVFGCGTRLTVLSGGGGSEVQLVESGGGLVQPGGSLKLSCAASGFTFNKYAMNWVRQAPGKGLEWVARIRSKYNNYATYYADSVKDRFTISRDDSKNTAYLQMNNLKTEDTAVYYCVRHGNFGNSYISYWAYWGQGTLVTVSSGGGGSGGGGSGGGGSQTVVTQEPSLTVSPGGTVTLTCGSSTGAVTSGNYPNWVQQKPGQAPRGLIGGTKFLAPGTPARFSGSLLGGKAALTLSGVQPEDEAEYYCVLWYSNRWVFGGGTKLTVL

SEQ ID NO: 1154 - protein, 989 aa, Artificial Sequence
  Synthetic peptide
QVQLVESGGGVVQPGRSLRLSCAASGFTFSTYGMHWVRQAPGKCLEWVAVIWYEGSNKYYGESVKGRFTISRDNSKNTLYLQMNSLRAEDTAVYYCARDNSHYYYGMDVWGQGTLVTVSSGGGGSGGGGSGGGGSQSVLTQPPSVSGAPGQRVTISCTGSSSNIGAGYDVNWYQQLPGTAPKLLIYVNNNRPSGVPDRFSGSKSGTSASLAITGLQAEDEADYYCQSYETSLSASVFGCGTRLTVLSGGGGSEVQLVESGGGLVQPGGSLKLSCAASGFTFNKYAMNWVRQAPGKGLEWVARIRSKYNNYATYYADSVKDRFTISRDDSKNTAYLQMNNLKTEDTAVYYCVRHGNFGNSYISYWAYWGQGTLVTVSSGGGGSGGGGSGGGGSQTVVTQEPSLTVSPGGTVTLTCGSSTGAVTSGNYPNWVQQKPGQAPRGLIGGTKFLAPGTPARFSGSLLGGKAALTLSGVQPEDEAEYYCVLWYSNRWVFGGGTKLTVLGGGGDKTHTCPPCPAPELLGGPSVFLFPPKPKDTLMISRTPEVTCVVVDVSHEDPEVKFNWYVDGVEVHNAKTKPCEEQYGSTYRCVSVLTVLHQDWLNGKEYKCKVSNKALPAPIEKTISKAKGQPREPQVYTLPPSREEMTKNQVSLTCLVKGFYPSDIAVEWESNGQPENNYKTTPPVLDSDGSFFLYSKLTVDKSRWQQGNVFSCSVMHEALHNHYTQKSLSLSPGKGGGGSGGGGSGGGGSGGGGSGGGGSGGGGSDKTHTCPPCPAPELLGGPSVFLFPPKPKDTLMISRTPEVTCVVVDVSHEDPEVKFNWYVDGVEVHNAKTKPCEEQYGSTYRCVSVLTVLHQDWLNGKEYKCKVSNKALPAPIEKTISKAKGQPREPQVYTLPPSREEMTKNQVSLTCLVKGFYPSDIAVEWESNGQPENNYKTTPPVLDSDGSFFLYSKLTVDKSRWQQGNVFSCSVMHEALHNHYTQKSLSLSPGK

SEQ ID NO: 1155 - protein, 120 aa, Artificial Sequence
  Synthetic peptide
QVQLVESGGGVVQPGRSLRLSCAASGFTFSTYGMHWVRQAPGKGLEWVAVIWYEGSNKYYGESVKGRFTISRDNSKNTLYLQMNSLRAEDTAVYYCARDNSHYYYGMDVWGQGTLVTVSS

SEQ ID NO: 1156 - protein, 111 aa, Artificial Sequence
  Synthetic peptide
QSVLTQPPSVSGAPGQRVTISCTGSSSNIGAGYDVNWYQQLPGTAPKLLIYVNNNRPSGVPDRFSGSKSGTSASLAITGLQAEDEADYYCQSYETSLSASVFGGGTRLTVL

SEQ ID NO: 1157 - protein, 246 aa, Artificial Sequence
  Synthetic peptide
QVQLVESGGGVVQPGRSLRLSCAASGFTFSTYGMHWVRQAPGKGLEWVAVIWYEGSNKYYGESVKGRFTISRDNSKNTLYLQMNSLRAEDTAVYYCARDNSHYYYGMDVWGQGTLVTVSSGGGGSGGGGSGGGGSQSVLTQPPSVSGAPGQRVTISCTGSSSNIGAGYDVNWYQQLPGTAPKLLIYVNNNRPSGVPDRFSGSKSGTSASLAITGLQAEDEADYYCQSYETSLSASVFGGGTRLTVL

SEQ ID NO: 1158 - protein, 501 aa, Artificial Sequence
  Synthetic peptide
QVQLVESGGGVVQPGRSLRLSCAASGFTFSTYGMHWVRQAPGKGLEWVAVIWYEGSNKYYGESVKGRFTISRDNSKNTLYLQMNSLRAEDTAVYYCARDNSHYYYGMDVWGQGTLVTVSSGGGGSGGGGSGGGGSQSVLTQPPSVSGAPGQRVTISCTGSSSNIGAGYDVNWYQQLPGTAPKLLIYVNNNRPSGVPDRFSGSKSGTSASLAITGLQAEDEADYYCQSYETSLSASVFGGGTRLTVLSGGGGSEVQLVESGGGLVQPGGSLKLSCAASGFTFNKYAMNWVRQAPGKGLEWVARIRSKYNNYATYYADSVKDRFTISRDDSKNTAYLQMNNLKTEDTAVYYCVRHGNFGNSYISYWAYWGQGTLVTVSSGGGGSGGGGSGGGGSQTVVTQEPSLTVSPGGTVTLTCGSSTGAVTSGNYPNWVQQKPGQAPRGLIGGTKFLAPGTPARFSGSLLGGKAALTLSGVQPEDEAEYYCVLWYSNRWVFGGGTKLTVL

SEQ ID NO: 1159 - protein, 989 aa, Artificial Sequence
  Synthetic peptide
QVQLVESGGGVVQPGRSLRLSCAASGFTFSTYGMHWVRQAPGKGLEWVAVIWYEGSNKYYGESVKGRFTISRDNSKNTLYLQMNSLRAEDTAVYYCARDNSHYYYGMDVWGQGTLVTVSSGGGGSGGGGSGGGGSQSVLTQPPSVSGAPGQRVTISCTGSSSNIGAGYDVNWYQQLPGTAPKLLIYVNNNRPSGVPDRFSGSKSGTSASLAITGLQAEDEADYYCQSYETSLSASVFGGGTRLTVLSGGGGSEVQLVESGGGLVQPGGSLKLSCAASGFTFNKYAMNWVRQAPGKGLEWVARIRSKYNNYATYYADSVKDRFTISRDDSKNTAYLQMNNLKTEDTAVYYCVRHGNFGNSYISYWAYWGQGTLVTVSSGGGGSGGGGSGGGGSQTVVTQEPSLTVSPGGTVTLTCGSSTGAVTSGNYPNWVQQKPGQAPRGLIGGTKFLAPGTPARFSGSLLGGKAALTLSGVQPEDEAEYYCVLWYSNRWVFGGGTKLTVLGGGGDKTHTCPPCPAPELLGGPSVFLFPPKPKDTLMISRTPEVTCVVVDVSHEDPEVKFNWYVDGVEVHNAKTKPCEEQYGSTYRCVSVLTVLHQDWLNGKEYKCKVSNKALPAPIEKTISKAKGQPREPQVYTLPPSREEMTKNQVSLTCLVKGFYPSDIAVEWESNGQPENNYKTTPPVLDSDGSFFLYSKLTVDKSRWQQGNVFSCSVMHEALHNHYTQKSLSLSPGKGGGGSGGGGSGGGGSGGGGSGGGGSGGGGSDKTHTCPPCPAPELLGGPSVFLFPPKPKDTLMISRTPEVTCVVVDVSHEDPEVKFNWYVDGVEVHNAKTKPCEEQYGSTYRCVSVLTVLHQDWLNGKEYKCKVSNKALPAPIEKTISKAKGQPREPQVYTLPPSREEMTKNQVSLTCLVKGFYPSDIAVEWESNGQPENNYKTTPPVLDSDGSFFLYSKLTVDKSRWQQGNVFSCSVMHEALHNHYTQKSLSLSPGK

SEQ ID NO: 1160 - protein, 7 aa, Artificial Sequence
  Synthetic peptide
SGVYYWS

SEQ ID NO: 1161 - protein, 16 aa, Artificial Sequence
  Synthetic peptide
YIYYSGSTSYNPSLKS

SEQ ID NO: 1162 - protein, 10 aa, Artificial Sequence
  Synthetic peptide
SGYSYALFDY

SEQ ID NO: 1163 - protein, 11 aa, Artificial Sequence
  Synthetic peptide
RASQSVDRYFN

SEQ ID NO: 1164 - protein, 7 aa, Artificial Sequence
  Synthetic peptide
AASSLQS

SEQ ID NO: 1165 - protein, 9 aa, Artificial Sequence
  Synthetic peptide
QQSYSTPWT

SEQ ID NO: 1166 - protein, 120 aa, Artificial Sequence
  Synthetic peptide
QMQLQESGPGLVKPSETLSLTCTVSGGSIESGVYYWSWIRQPPGKCLEWIGYIYYSGSTSYNPSLKSRLTMSVDTSKNQFSLKLSSVTAADTAVYYCARSGYSYALFDYWGQGTLVTVSS

SEQ ID NO: 1167 - protein, 107 aa, Artificial Sequence
  Synthetic peptide
DIQMTQSPSSLSASLGDRVTITCRASQSVDRYFNWYQQKPGKAPKVLIFAASSLQSGVPSRFSGSGSGTDFTLTISSLQPEDFATYYCQQSYSTPWTFGCGTKVEVK

SEQ ID NO: 1168 - protein, 242 aa, Artificial Sequence
  Synthetic peptide
QMQLQESGPGLVKPSETLSLTCTVSGGSIESGVYYWSWIRQPPGKCLEWIGYIYYSGSTSYNPSLKSRLTMSVDTSKNQFSLKLSSVTAADTAVYYCARSGYSYALFDYWGQGTLVTVSSGGGGSGGGGSGGGGSDIQMTQSPSSLSASLGDRVTITCRASQSVDRYFNWYQQKPGKAPKVLIFAASSLQSGVPSRFSGSGSGTDFTLTISSLQPEDFATYYCQQSYSTPWTFGCGTKVEVK

SEQ ID NO: 1169 - protein, 497 aa, Artificial Sequence
  Synthetic peptide
QMQLQESGPGLVKPSETLSLTCTVSGGSIESGVYYWSWIRQPPGKCLEWIGYIYYSGSTSYNPSLKSRLTMSVDTSKNQFSLKLSSVTAADTAVYYCARSGYSYALFDYWGQGTLVTVSSGGGGSGGGGSGGGGSDIQMTQSPSSLSASLGDRVTITCRASQSVDRYFNWYQQKPGKAPKVLIFAASSLQSGVPSRFSGSGSGTDFTLTISSLQPEDFATYYCQQSYSTPWTFGCGTKVEVKSGGGGSEVQLVESGGGLVQPGGSLKLSCAASGFTFNKYAMNWVRQAPGKGLEWVARIRSKYNNYATYYADSVKDRFTISRDDSKNTAYLQMNNLKTEDTAVYYCVRHGNFGNSYISYWAYWGQGTLVTVSSGGGGSGGGGSGGGGSQTVVTQEPSLTVSPGGTVTLTCGSSTGAVTSGNYPNWVQQKPGQAPRGLIGGTKFLAPGTPARFSGSLLGGKAALTLSGVQPEDEAEYYCVLWYSNRWVFGGGTKLTVL

SEQ ID NO: 1170 - protein, 985 aa, Artificial Sequence
  Synthetic peptide
QMQLQESGPGLVKPSETLSLTCTVSGGSIESGVYYWSWIRQPPGKCLEWIGYIYYSGSTSYNPSLKSRLTMSVDTSKNQFSLKLSSVTAADTAVYYCARSGYSYALFDYWGQGTLVTVSSGGGGSGGGGSGGGGSDIQMTQSPSSLSASLGDRVTITCRASQSVDRYFNWYQQKPGKAPKVLIFAASSLQSGVPSRFSGSGSGTDFTLTISSLQPEDFATYYCQQSYSTPWTFGCGTKVEVKSGGGGSEVQLVESGGGLVQPGGSLKLSCAASGFTFNKYAMNWVRQAPGKGLEWVARIRSKYNNYATYYADSVKDRFTISRDDSKNTAYLQMNNLKTEDTAVYYCVRHGNFGNSYISYWAYWGQGTLVTVSSGGGGSGGGGSGGGGSQTVVTQEPSLTVSPGGTVTLTCGSSTGAVTSGNYPNWVQQKPGQAPRGLIGGTKFLAPGTPARFSGSLLGGKAALTLSGVQPEDEAEYYCVLWYSNRWVFGGGTKLTVLGGGGDKTHTCPPCPAPELLGGPSVFLFPPKPKDTLMISRTPEVTCVVVDVSHEDPEVKFNWYVDGVEVHNAKTKPCEEQYGSTYRCVSVLTVLHQDWLNGKEYKCKVSNKALPAPIEKTISKAKGQPREPQVYTLPPSREEMTKNQVSLTCLVKGFYPSDIAVEWESNGQPENNYKTTPPVLDSDGSFFLYSKLTVDKSRWQQGNVFSCSVMHEALHNHYTQKSLSLSPGKGGGGSGGGGSGGGGSGGGGSGGGGSGGGGSDKTHTCPPCPAPELLGGPSVFLFPPKPKDTLMISRTPEVTCVVVDVSHEDPEVKFNWYVDGVEVHNAKTKPCEEQYGSTYRCVSVLTVLHQDWLNGKEYKCKVSNKALPAPIEKTISKAKGQPREPQVYTLPPSREEMTKNQVSLTCLVKGFYPSDIAVEWESNGQPENNYKTTPPVLDSDGSFFLYSKLTVDKSRWQQGNVFSCSVMHEALHNHYTQKSLSLSPGK

SEQ ID NO: 1171 - protein, 120 aa, Artificial Sequence
  Synthetic peptide
QMQLQESGPGLVKPSETLSLTCTVSGGSIESGVYYWSWIRQPPGKGLEWIGYIYYSGSTSYNPSLKSRLTMSVDTSKNQFSLKLSSVTAADTAVYYCARSGYSYALFDYWGQGTLVTVSS

SEQ ID NO: 1172 - protein, 107 aa, Artificial Sequence
  Synthetic peptide
DIQMTQSPSSLSASLGDRVTITCRASQSVDRYFNWYQQKPGKAPKVLIFAASSLQSGVPSRFSGSGSGTDFTLTISSLQPEDFATYYCQQSYSTPWTFGQGTKVEVK

SEQ ID NO: 1173 - protein, 242 aa, Artificial Sequence
  Synthetic peptide
QMQLQESGPGLVKPSETLSLTCTVSGGSIESGVYYWSWIRQPPGKGLEWIGYIYYSGSTSYNPSLKSRLTMSVDTSKNQFSLKLSSVTAADTAVYYCARSGYSYALFDYWGQGTLVTVSSGGGGSGGGGSGGGGSDIQMTQSPSSLSASLGDRVTITCRASQSVDRYFNWYQQKPGKAPKVLIFAASSLQSGVPSRFSGSGSGTDFTLTISSLQPEDFATYYCQQSYSTPWTFGQGTKVEVK

SEQ ID NO: 1174 - protein, 497 aa, Artificial Sequence
  Synthetic peptide
QMQLQESGPGLVKPSETLSLTCTVSGGSIESGVYYWSWIRQPPGKGLEWIGYIYYSGSTSYNPSLKSRLTMSVDTSKNQFSLKLSSVTAADTAVYYCARSGYSYALFDYWGQGTLVTVSSGGGGSGGGGSGGGGSDIQMTQSPSSLSASLGDRVTITCRASQSVDRYFNWYQQKPGKAPKVLIFAASSLQSGVPSRFSGSGSGTDFTLTISSLQPEDFATYYCQQSYSTPWTFGQGTKVEVKSGGGGSEVQLVESGGGLVQPGGSLKLSCAASGFTFNKYAMNWVRQAPGKGLEWVARIRSKYNNYATYYADSVKDRFTISRDDSKNTAYLQMNNLKTEDTAVYYCVRHGNFGNSYISYWAYWGQGTLVTVSSGGGGSGGGGSGGGGSQTVVTQEPSLTVSPGGTVTLTCGSSTGAVTSGNYPNWVQQKPGQAPRGLIGGTKFLAPGTPARFSGSLLGGKAALTLSGVQPEDEAEYYCVLWYSNRWVFGGGTKLTVL

SEQ ID NO: 1175 - protein, 985 aa, Artificial Sequence
  Synthetic peptide
QMQLQESGPGLVKPSETLSLTCTVSGGSIESGVYYWSWIRQPPGKGLEWIGYIYYSGSTSYNPSLKSRLTMSVDTSKNQFSLKLSSVTAADTAVYYCARSGYSYALFDYWGQGTLVTVSSGGGGSGGGGSGGGGSDIQMTQSPSSLSASLGDRVTITCRASQSVDRYFNWYQQKPGKAPKVLIFAASSLQSGVPSRFSGSGSGTDFTLTISSLQPEDFATYYCQQSYSTPWTFGQGTKVEVKSGGGGSEVQLVESGGGLVQPGGSLKLSCAASGFTFNKYAMNWVRQAPGKGLEWVARIRSKYNNYATYYADSVKDRFTISRDDSKNTAYLQMNNLKTEDTAVYYCVRHGNFGNSYISYWAYWGQGTLVTVSSGGGGSGGGGSGGGGSQTVVTQEPSLTVSPGGTVTLTCGSSTGAVTSGNYPNWVQQKPGQAPRGLIGGTKFLAPGTPARFSGSLLGGKAALTLSGVQPEDEAEYYCVLWYSNRWVFGGGTKLTVLGGGGDKTHTCPPCPAPELLGGPSVFLFPPKPKDTLMISRTPEVTCVVVDVSHEDPEVKFNWYVDGVEVHNAKTKPCEEQYGSTYRCVSVLTVLHQDWLNGKEYKCKVSNKALPAPIEKTISKAKGQPREPQVYTLPPSREEMTKNQVSLTCLVKGFYPSDIAVEWESNGQPENNYKTTPPVLDSDGSFFLYSKLTVDKSRWQQGNVFSCSVMHEALHNHYTQKSLSLSPGKGGGGSGGGGSGGGGSGGGGSGGGGSGGGGSDKTHTCPPCPAPELLGGPSVFLFPPKPKDTLMISRTPEVTCVVVDVSHEDPEVKFNWYVDGVEVHNAKTKPCEEQYGSTYRCVSVLTVLHQDWLNGKEYKCKVSNKALPAPIEKTISKAKGQPREPQVYTLPPSREEMTKNQVSLTCLVKGFYPSDIAVEWESNGQPENNYKTTPPVLDSDGSFFLYSKLTVDKSRWQQGNVFSCSVMHEALHNHYTQKSLSLSPGK

SEQ ID NO: 1176 - protein, 7 aa, Artificial Sequence
  Synthetic peptide
SGGYYWS

SEQ ID NO: 1177 - protein, 16 aa, Artificial Sequence
  Synthetic peptide
YIFYSGSTDYNPSLKS

SEQ ID NO: 1178 - protein, 10 aa, Artificial Sequence
  Synthetic peptide
SGYSYALFDA

SEQ ID NO: 1179 - protein, 11 aa, Artificial Sequence
  Synthetic peptide
RASQFIGRYFN

SEQ ID NO: 1180 - protein, 7 aa, Artificial Sequence
  Synthetic peptide
AESSLQS

SEQ ID NO: 1181 - protein, 9 aa, Artificial Sequence
  Synthetic peptide
QQSYSTPWT

SEQ ID NO: 1182 - protein, 120 aa, Artificial Sequence
  Synthetic peptide
QVQLQESGPGLVKPSQTLSLTCTVSGDSIISGGYYWSWIRQPPGKCLEWIGYIFYSGSTDYNPSLKSRVTISVDTSKNQFSLKLSSVTAADTAVYYCARSGYSYALFDAWGQGTLVTVSS

SEQ ID NO: 1183 - protein, 107 aa, Artificial Sequence
  Synthetic peptide
DIQMTQSPSSLSASVGDRVTISCRASQFIGRYFNWYQQKPGKAPKVLIYAESSLQSGVPSRFSGSGSGTEFTLTISSLQPEDFATYYCQQSYSTPWTFGCGTKVEIK

SEQ ID NO: 1184 - protein, 242 aa, Artificial Sequence
  Synthetic peptide
QVQLQESGPGLVKPSQTLSLTCTVSGDSIISGGYYWSWIRQPPGKCLEWIGYIFYSGSTDYNPSLKSRVTISVDTSKNQFSLKLSSVTAADTAVYYCARSGYSYALFDAWGQGTLVTVSSGGGGSGGGGSGGGGSDIQMTQSPSSLSASVGDRVTISCRASQFIGRYFNWYQQKPGKAPKVLIYAESSLQSGVPSRFSGSGSGTEFTLTISSLQPEDFATYYCQQSYSTPWTFGCGTKVEIK

SEQ ID NO: 1185 - protein, 497 aa, Artificial Sequence
  Synthetic peptide
QVQLQESGPGLVKPSQTLSLTCTVSGDSIISGGYYWSWIRQPPGKCLEWIGYIFYSGSTDYNPSLKSRVTISVDTSKNQFSLKLSSVTAADTAVYYCARSGYSYALFDAWGQGTLVTVSSGGGGSGGGGSGGGGSDIQMTQSPSSLSASVGDRVTISCRASQFIGRYFNWYQQKPGKAPKVLIYAESSLQSGVPSRFSGSGSGTEFTLTISSLQPEDFATYYCQQSYSTPWTFGCGTKVEIKSGGGGSEVQLVESGGGLVQPGGSLKLSCAASGFTFNKYAMNWVRQAPGKGLEWVARIRSKYNNYATYYADSVKDRFTISRDDSKNTAYLQMNNLKTEDTAVYYCVRHGNFGNSYISYWAYWGQGTLVTVSSGGGGSGGGGSGGGGSQTVVTQEPSLTVSPGGTVTLTCGSSTGAVTSGNYPNWVQQKPGQAPRGLIGGTKFLAPGTPARFSGSLLGGKAALTLSGVQPEDEAEYYCVLWYSNRWVFGGGTKLTVL

SEQ ID NO: 1186 - protein, 985 aa, Artificial Sequence
  Synthetic peptide
QVQLQESGPGLVKPSQTLSLTCTVSGDSIISGGYYWSWIRQPPGKCLEWIGYIFYSGSTDYNPSLKSRVTISVDTSKNQFSLKLSSVTAADTAVYYCARSGYSYALFDAWGQGTLVTVSSGGGGSGGGGSGGGGSDIQMTQSPSSLSASVGDRVTISCRASQFIGRYFNWYQQKPGKAPKVLIYAESSLQSGVPSRFSGSGSGTEFTLTISSLQPEDFATYYCQQSYSTPWTFGCGTKVEIKSGGGGSEVQLVESGGGLVQPGGSLKLSCAASGFTFNKYAMNWVRQAPGKGLEWVARIRSKYNNYATYYADSVKDRFTISRDDSKNTAYLQMNNLKTEDTAVYYCVRHGNFGNSYISYWAYWGQGTLVTVSSGGGGSGGGGSGGGGSQTVVTQEPSLTVSPGGTVTLTCGSSTGAVTSGNYPNWVQQKPGQAPRGLIGGTKFLAPGTPARFSGSLLGGKAALTLSGVQPEDEAEYYCVLWYSNRWVFGGGTKLTVLGGGGDKTHTCPPCPAPELLGGPSVFLFPPKPKDTLMISRTPEVTCVVVDVSHEDPEVKFNWYVDGVEVHNAKTKPCEEQYGSTYRCVSVLTVLHQDWLNGKEYKCKVSNKALPAPIEKTISKAKGQPREPQVYTLPPSREEMTKNQVSLTCLVKGFYPSDIAVEWESNGQPENNYKTTPPVLDSDGSFFLYSKLTVDKSRWQQGNVFSCSVMHEALHNHYTQKSLSLSPGKGGGGSGGGGSGGGGSGGGGSGGGGSGGGGSDKTHTCPPCPAPELLGGPSVFLFPPKPKDTLMISRTPEVTCVVVDVSHEDPEVKFNWYVDGVEVHNAKTKPCEEQYGSTYRCVSVLTVLHQDWLNGKEYKCKVSNKALPAPIEKTISKAKGQPREPQVYTLPPSREEMTKNQVSLTCLVKGFYPSDIAVEWESNGQPENNYKTTPPVLDSDGSFFLYSKLTVDKSRWQQGNVFSCSVMHEALHNHYTQKSLSLSPGK

SEQ ID NO: 1187 - protein, 120 aa, Artificial Sequence
  Synthetic peptide
QVQLQESGPGLVKPSQTLSLTCTVSGDSIISGGYYWSWIRQPPGKGLEWIGYIFYSGSTDYNPSLKSRVTISVDTSKNQFSLKLSSVTAADTAVYYCARSGYSYALFDAWGQGTLVTVSS

SEQ ID NO: 1188 - protein, 107 aa, Artificial Sequence
  Synthetic peptide
DIQMTQSPSSLSASVGDRVTISCRASQFIGRYFNWYQQKPGKAPKVLIYAESSLQSGVPSRFSGSGSGTEFTLTISSLQPEDFATYYCQQSYSTPWTFGQGTKVEIK

SEQ ID NO: 1189 - protein, 242 aa, Artificial Sequence
  Synthetic peptide
QVQLQESGPGLVKPSQTLSLTCTVSGDSIISGGYYWSWIRQPPGKGLEWIGYIFYSGSTDYNPSLKSRVTISVDTSKNQFSLKLSSVTAADTAVYYCARSGYSYALFDAWGQGTLVTVSSGGGGSGGGGSGGGGSDIQMTQSPSSLSASVGDRVTISCRASQFIGRYFNWYQQKPGKAPKVLIYAESSLQSGVPSRFSGSGSGTEFTLTISSLQPEDFATYYCQQSYSTPWTFGQGTKVEIK

SEQ ID NO: 1190 - protein, 497 aa, Artificial Sequence
  Synthetic peptide
QVQLQESGPGLVKPSQTLSLTCTVSGDSIISGGYYWSWIRQPPGKGLEWIGYIFYSGSTDYNPSLKSRVTISVDTSKNQFSLKLSSVTAADTAVYYCARSGYSYALFDAWGQGTLVTVSSGGGGSGGGGSGGGGSDIQMTQSPSSLSASVGDRVTISCRASQFIGRYFNWYQQKPGKAPKVLIYAESSLQSGVPSRFSGSGSGTEFTLTISSLQPEDFATYYCQQSYSTPWTFGQGTKVEIKSGGGGSEVQLVESGGGLVQPGGSLKLSCAASGFTFNKYAMNWVRQAPGKGLEWVARIRSKYNNYATYYADSVKDRFTISRDDSKNTAYLQMNNLKTEDTAVYYCVRHGNFGNSYISYWAYWGQGTLVTVSSGGGGSGGGGSGGGGSQTVVTQEPSLTVSPGGTVTLTCGSSTGAVTSGNYPNWVQQKPGQAPRGLIGGTKFLAPGTPARFSGSLLGGKAALTLSGVQPEDEAEYYCVLWYSNRWVFGGGTKLTVL

SEQ ID NO: 1191 - protein, 985 aa, Artificial Sequence
  Synthetic peptide
QVQLQESGPGLVKPSQTLSLTCTVSGDSIISGGYYWSWIRQPPGKGLEWIGYIFYSGSTDYNPSLKSRVTISVDTSKNQFSLKLSSVTAADTAVYYCARSGYSYALFDAWGQGTLVTVSSGGGGSGGGGSGGGGSDIQMTQSPSSLSASVGDRVTISCRASQFIGRYFNWYQQKPGKAPKVLIYAESSLQSGVPSRFSGSGSGTEFTLTISSLQPEDFATYYCQQSYSTPWTFGQGTKVEIKSGGGGSEVQLVESGGGLVQPGGSLKLSCAASGFTFNKYAMNWVRQAPGKGLEWVARIRSKYNNYATYYADSVKDRFTISRDDSKNTAYLQMNNLKTEDTAVYYCVRHGNFGNSYISYWAYWGQGTLVTVSSGGGGSGGGGSGGGGSQTVVTQEPSLTVSPGGTVTLTCGSSTGAVTSGNYPNWVQQKPGQAPRGLIGGTKFLAPGTPARFSGSLLGGKAALTLSGVQPEDEAEYYCVLWYSNRWVFGGGTKLTVLGGGGDKTHTCPPCPAPELLGGPSVFLFPPKPKDTLMISRTPEVTCVVVDVSHEDPEVKFNWYVDGVEVHNAKTKPCEEQYGSTYRCVSVLTVLHQDWLNGKEYKCKVSNKALPAPIEKTISKAKGQPREPQVYTLPPSREEMTKNQVSLTCLVKGFYPSDIAVEWESNGQPENNYKTTPPVLDSDGSFFLYSKLTVDKSRWQQGNVFSCSVMHEALHNHYTQKSLSLSPGKGGGGSGGGGSGGGGSGGGGSGGGGSGGGGSDKTHTCPPCPAPELLGGPSVFLFPPKPKDTLMISRTPEVTCVVVDVSHEDPEVKFNWYVDGVEVHNAKTKPCEEQYGSTYRCVSVLTVLHQDWLNGKEYKCKVSNKALPAPIEKTISKAKGQPREPQVYTLPPSREEMTKNQVSLTCLVKGFYPSDIAVEWESNGQPENNYKTTPPVLDSDGSFFLYSKLTVDKSRWQQGNVFSCSVMHEALHNHYTQKSLSLSPGK

SEQ ID NO: 1192 - protein, 984 aa, Artificial Sequence
  Synthetic peptide
EVQLLESGGGLVQPGGSLRLSCAASGFTFSSYAMSWVRQAPGKCLEWVSVISGSGGRPNYAESVKGRFTISRDNSKNTLYLQMNSLRDEDTAVYYCAKVDYSNYLFFDYWGQGTLVTVSSGGGGSGGGGSGGGGSEIVLTQSPGTLSLSPGEGATLSCRAGQSVRSSYLGWYQQKPGQAPRLLIYGASSRATGIPDRFSGSGSGTDFTLTISRLEPEDFAVYYCQQYGYSPPTFGCGTKLEIKSGGGGSEVQLVESGGGLVQPGGSLKLSCAASGFTFNKYAMNWVRQAPGKGLEWVARIRSKYNNYATYYADSVKDRFTISRDDSKNTAYLQMNNLKTEDTAVYYCVRHGNFGNSYISYWAYWGQGTLVTVSSGGGGSGGGGSGGGGSQTVVTQEPSLTVSPGGTVTLTCGSSTGAVTSGNYPNWVQQKPGQAPRGLIGGTKFLAPGTPARFSGSLLGGKAALTLSGVQPEDEAEYYCVLWYSNRWVFGGGTKLTVLGGGGDKTHTCPPCPAPELLGGPSVFLFPPKPKDTLMISRTPEVTCVVVDVSHEDPEVKFNWYVDGVEVHNAKTKPCEEQYGSTYRCVSVLTVLHQDWLNGKEYKCKVSNKALPAPIEKTISKAKGQPREPQVYTLPPSREEMTKNQVSLTCLVKGFYPSDIAVEWESNGQPENNYKTTPPVLDSDGSFFLYSKLTVDKSRWQQGNVFSCSVMHEALHNHYTQKSLSLSPGGGGSGGGGSGGGGSGGGGSGGGGSGGGGSDKTHTCPPCPAPELLGGPSVFLFPPKPKDTLMISRTPEVTCVVVDVSHEDPEVKFNWYVDGVEVHNAKTKPCEEQYGSTYRCVSVLTVLHQDWLNGKEYKCKVSNKALPAPIEKTISKAKGQPREPQVYTLPPSREEMTKNQVSLTCLVKGFYPSDIAVEWESNGQPENNYKTTPPVLDSDGSFFLYSKLTVDKSRWQQGNVFSCSVMHEALHNHYTQKSLSLSPGK

SEQ ID NO: 1193 - protein, 984 aa, Artificial Sequence
  Synthetic peptide
EVQLLESGGGLVQPGGSLRLSCAASGFTFSSYAMSWVRQAPGKGLEWVSVISGSGGRPNYAESVKGRFTISRDNSKNTLYLQMNSLRDEDTAVYYCAKVDYSNYLFFDYWGQGTLVTVSSGGGGSGGGGSGGGGSEIVLTQSPGTLSLSPGEGATLSCRAGQSVRSSYLGWYQQKPGQAPRLLIYGASSRATGIPDRFSGSGSGTDFTLTISRLEPEDFAVYYCQQYGYSPPTFGGGTKLEIKSGGGGSEVQLVESGGGLVQPGGSLKLSCAASGFTFNKYAMNWVRQAPGKGLEWVARIRSKYNNYATYYADSVKDRFTISRDDSKNTAYLQMNNLKTEDTAVYYCVRHGNFGNSYISYWAYWGQGTLVTVSSGGGGSGGGGSGGGGSQTVVTQEPSLTVSPGGTVTLTCGSSTGAVTSGNYPNWVQQKPGQAPRGLIGGTKFLAPGTPARFSGSLLGGKAALTLSGVQPEDEAEYYCVLWYSNRWVFGGGTKLTVLGGGGDKTHTCPPCPAPELLGGPSVFLFPPKPKDTLMISRTPEVTCVVVDVSHEDPEVKFNWYVDGVEVHNAKTKPCEEQYGSTYRCVSVLTVLHQDWLNGKEYKCKVSNKALPAPIEKTISKAKGQPREPQVYTLPPSREEMTKNQVSLTCLVKGFYPSDIAVEWESNGQPENNYKTTPPVLDSDGSFFLYSKLTVDKSRWQQGNVFSCSVMHEALHNHYTQKSLSLSPGGGGSGGGGSGGGGSGGGGSGGGGSGGGGSDKTHTCPPCPAPELLGGPSVFLFPPKPKDTLMISRTPEVTCVVVDVSHEDPEVKFNWYVDGVEVHNAKTKPCEEQYGSTYRCVSVLTVLHQDWLNGKEYKCKVSNKALPAPIEKTISKAKGQPREPQVYTLPPSREEMTKNQVSLTCLVKGFYPSDIAVEWESNGQPENNYKTTPPVLDSDGSFFLYSKLTVDKSRWQQGNVFSCSVMHEALHNHYTQKSLSLSPGK

SEQ ID NO: 1194 - protein, 984 aa, Artificial Sequence
  Synthetic peptide
EVQLLESGGGLVQPGGSLKLSCAASGFTFSIYAMSWVRQAPGKCLEWVSAISGSGGSTFYAESVKGRFTISRDNSKNTLYLQMNSLRAEDTAVYYCAKHDYSNYPYFDYWGQGTLVTVSSGGGGSGGGGSGGGGSEIVLTQSPGTLSLSPGERATLSCRASQSVRSSYLAWYQQKPGQAPRLLIYGASSRATGIPDRFSGSGSGTDFTLTISRLEPEDFAVYYCQQYGDLPFTFGCGTKLEIKSGGGGSEVQLVESGGGLVQPGGSLKLSCAASGFTFNKYAMNWVRQAPGKGLEWVARIRSKYNNYATYYADSVKDRFTISRDDSKNTAYLQMNNLKTEDTAVYYCVRHGNFGNSYISYWAYWGQGTLVTVSSGGGGSGGGGSGGGGSQTVVTQEPSLTVSPGGTVTLTCGSSTGAVTSGNYPNWVQQKPGQAPRGLIGGTKFLAPGTPARFSGSLLGGKAALTLSGVQPEDEAEYYCVLWYSNRWVFGGGTKLTVLGGGGDKTHTCPPCPAPELLGGPSVFLFPPKPKDTLMISRTPEVTCVVVDVSHEDPEVKFNWYVDGVEVHNAKTKPCEEQYGSTYRCVSVLTVLHQDWLNGKEYKCKVSNKALPAPIEKTISKAKGQPREPQVYTLPPSREEMTKNQVSLTCLVKGFYPSDIAVEWESNGQPENNYKTTPPVLDSDGSFFLYSKLTVDKSRWQQGNVFSCSVMHEALHNHYTQKSLSLSPGGGGSGGGGSGGGGSGGGGSGGGGSGGGGSDKTHTCPPCPAPELLGGPSVFLFPPKPKDTLMISRTPEVTCVVVDVSHEDPEVKFNWYVDGVEVHNAKTKPCEEQYGSTYRCVSVLTVLHQDWLNGKEYKCKVSNKALPAPIEKTISKAKGQPREPQVYTLPPSREEMTKNQVSLTCLVKGFYPSDIAVEWESNGQPENNYKTTPPVLDSDGSFFLYSKLTVDKSRWQQGNVFSCSVMHEALHNHYTQKSLSLSPGK

SEQ ID NO: 1195 - protein, 984 aa, Artificial Sequence
  Synthetic peptide
EVQLLESGGGLVQPGGSLKLSCAASGFTFSIYAMSWVRQAPGKGLEWVSAISGSGGSTFYAESVKGRFTISRDNSKNTLYLQMNSLRAEDTAVYYCAKHDYSNYPYFDYWGQGTLVTVSSGGGGSGGGGSGGGGSEIVLTQSPGTLSLSPGERATLSCRASQSVRSSYLAWYQQKPGQAPRLLIYGASSRATGIPDRFSGSGSGTDFTLTISRLEPEDFAVYYCQQYGDLPFTFGPGTKLEIKSGGGGSEVQLVESGGGLVQPGGSLKLSCAASGFTFNKYAMNWVRQAPGKGLEWVARIRSKYNNYATYYADSVKDRFTISRDDSKNTAYLQMNNLKTEDTAVYYCVRHGNFGNSYISYWAYWGQGTLVTVSSGGGGSGGGGSGGGGSQTVVTQEPSLTVSPGGTVTLTCGSSTGAVTSGNYPNWVQQKPGQAPRGLIGGTKFLAPGTPARFSGSLLGGKAALTLSGVQPEDEAEYYCVLWYSNRWVFGGGTKLTVLGGGGDKTHTCPPCPAPELLGGPSVFLFPPKPKDTLMISRTPEVTCVVVDVSHEDPEVKFNWYVDGVEVHNAKTKPCEEQYGSTYRCVSVLTVLHQDWLNGKEYKCKVSNKALPAPIEKTISKAKGQPREPQVYTLPPSREEMTKNQVSLTCLVKGFYPSDIAVEWESNGQPENNYKTTPPVLDSDGSFFLYSKLTVDKSRWQQGNVFSCSVMHEALHNHYTQKSLSLSPGGGGSGGGGSGGGGSGGGGSGGGGSGGGGSDKTHTCPPCPAPELLGGPSVFLFPPKPKDTLMISRTPEVTCVVVDVSHEDPEVKFNWYVDGVEVHNAKTKPCEEQYGSTYRCVSVLTVLHQDWLNGKEYKCKVSNKALPAPIEKTISKAKGQPREPQVYTLPPSREEMTKNQVSLTCLVKGFYPSDIAVEWESNGQPENNYKTTPPVLDSDGSFFLYSKLTVDKSRWQQGNVFSCSVMHEALHNHYTQKSLSLSPGK

SEQ ID NO: 1196 - protein, 984 aa, Artificial Sequence
  Synthetic peptide
EVQLLESGGGMVQPGGSLRLSCAASGFTFSSYAMSWVRQAPGKCLEWVSAISGSGGRTFYAESVEGRFTISRDNSKNTLFLQMNSLRAEDTAVYYCAKHDYSNYPYFDYWGQGTLVTVSSGGGGSGGGGSGGGGSEIVLTQSPGTLSLSPGERATLSCRASQSVRSSYLAWYQQKPGQAPRLLIYGASSRATGIPDRFSGSGSGTDFTLTISRLEPEDFAVYYCQQYGSSPFTFGCGTKLEIKSGGGGSEVQLVESGGGLVQPGGSLKLSCAASGFTFNKYAMNWVRQAPGKGLEWVARIRSKYNNYATYYADSVKDRFTISRDDSKNTAYLQMNNLKTEDTAVYYCVRHGNFGNSYISYWAYWGQGTLVTVSSGGGGSGGGGSGGGGSQTVVTQEPSLTVSPGGTVTLTCGSSTGAVTSGNYPNWVQQKPGQAPRGLIGGTKFLAPGTPARFSGSLLGGKAALTLSGVQPEDEAEYYCVLWYSNRWVFGGGTKLTVLGGGGDKTHTCPPCPAPELLGGPSVFLFPPKPKDTLMISRTPEVTCVVVDVSHEDPEVKFNWYVDGVEVHNAKTKPCEEQYGSTYRCVSVLTVLHQDWLNGKEYKCKVSNKALPAPIEKTISKAKGQPREPQVYTLPPSREEMTKNQVSLTCLVKGFYPSDIAVEWESNGQPENNYKTTPPVLDSDGSFFLYSKLTVDKSRWQQGNVFSCSVMHEALHNHYTQKSLSLSPGGGGSGGGGSGGGGSGGGGSGGGGSGGGGSDKTHTCPPCPAPELLGGPSVFLFPPKPKDTLMISRTPEVTCVVVDVSHEDPEVKFNWYVDGVEVHNAKTKPCEEQYGSTYRCVSVLTVLHQDWLNGKEYKCKVSNKALPAPIEKTISKAKGQPREPQVYTLPPSREEMTKNQVSLTCLVKGFYPSDIAVEWESNGQPENNYKTTPPVLDSDGSFFLYSKLTVDKSRWQQGNVFSCSVMHEALHNHYTQKSLSLSPGK

SEQ ID NO: 1197 - protein, 984 aa, Artificial Sequence
  Synthetic peptide
EVQLLESGGGMVQPGGSLRLSCAASGFTFSSYAMSWVRQAPGKGLEWVSAISGSGGRTFYAESVEGRFTISRDNSKNTLFLQMNSLRAEDTAVYYCAKHDYSNYPYFDYWGQGTLVTVSSGGGGSGGGGSGGGGSEIVLTQSPGTLSLSPGERATLSCRASQSVRSSYLAWYQQKPGQAPRLLIYGASSRATGIPDRFSGSGSGTDFTLTISRLEPEDFAVYYCQQYGSSPFTFGPGTKLEIKSGGGGSEVQLVESGGGLVQPGGSLKLSCAASGFTFNKYAMNWVRQAPGKGLEWVARIRSKYNNYATYYADSVKDRFTISRDDSKNTAYLQMNNLKTEDTAVYYCVRHGNFGNSYISYWAYWGQGTLVTVSSGGGGSGGGGSGGGGSQTVVTQEPSLTVSPGGTVTLTCGSSTGAVTSGNYPNWVQQKPGQAPRGLIGGTKFLAPGTPARFSGSLLGGKAALTLSGVQPEDEAEYYCVLWYSNRWVFGGGTKLTVLGGGGDKTHTCPPCPAPELLGGPSVFLFPPKPKDTLMISRTPEVTCVVVDVSHEDPEVKFNWYVDGVEVHNAKTKPCEEQYGSTYRCVSVLTVLHQDWLNGKEYKCKVSNKALPAPIEKTISKAKGQPREPQVYTLPPSREEMTKNQVSLTCLVKGFYPSDIAVEWESNGQPENNYKTTPPVLDSDGSFFLYSKLTVDKSRWQQGNVFSCSVMHEALHNHYTQKSLSLSPGGGGSGGGGSGGGGSGGGGSGGGGSGGGGSDKTHTCPPCPAPELLGGPSVFLFPPKPKDTLMISRTPEVTCVVVDVSHEDPEVKFNWYVDGVEVHNAKTKPCEEQYGSTYRCVSVLTVLHQDWLNGKEYKCKVSNKALPAPIEKTISKAKGQPREPQVYTLPPSREEMTKNQVSLTCLVKGFYPSDIAVEWESNGQPENNYKTTPPVLDSDGSFFLYSKLTVDKSRWQQGNVFSCSVMHEALHNHYTQKSLSLSPGK

SEQ ID NO: 1198 - protein, 984 aa, Artificial Sequence
  Synthetic peptide
EVQLLESGGGMVQPGGSLRLSCAASGFTFSSYAMSWVRQAPGKCLEWVSAISGSGGRTFYAESVEGRFTISRDNSKNTLYLQMNSLRAEDTAVYYCAKHDYSNYPYFDYWGQGTLVTVSSGGGGSGGGGSGGGGSEIVLTQSPGTLSLSPGERATLSCRASQSIRSSYLAWYQQKPGQAPRLLIYGASSRATGIPDRFSGSGSGTDFTLTISRLEPEDFAVYYCQQYGDLPFTFGCGTKLEIKSGGGGSEVQLVESGGGLVQPGGSLKLSCAASGFTFNKYAMNWVRQAPGKGLEWVARIRSKYNNYATYYADSVKDRFTISRDDSKNTAYLQMNNLKTEDTAVYYCVRHGNFGNSYISYWAYWGQGTLVTVSSGGGGSGGGGSGGGGSQTVVTQEPSLTVSPGGTVTLTCGSSTGAVTSGNYPNWVQQKPGQAPRGLIGGTKFLAPGTPARFSGSLLGGKAALTLSGVQPEDEAEYYCVLWYSNRWVFGGGTKLTVLGGGGDKTHTCPPCPAPELLGGPSVFLFPPKPKDTLMISRTPEVTCVVVDVSHEDPEVKFNWYVDGVEVHNAKTKPCEEQYGSTYRCVSVLTVLHQDWLNGKEYKCKVSNKALPAPIEKTISKAKGQPREPQVYTLPPSREEMTKNQVSLTCLVKGFYPSDIAVEWESNGQPENNYKTTPPVLDSDGSFFLYSKLTVDKSRWQQGNVFSCSVMHEALHNHYTQKSLSLSPGGGGSGGGGSGGGGSGGGGSGGGGSGGGGSDKTHTCPPCPAPELLGGPSVFLFPPKPKDTLMISRTPEVTCVVVDVSHEDPEVKFNWYVDGVEVHNAKTKPCEEQYGSTYRCVSVLTVLHQDWLNGKEYKCKVSNKALPAPIEKTISKAKGQPREPQVYTLPPSREEMTKNQVSLTCLVKGFYPSDIAVEWESNGQPENNYKTTPPVLDSDGSFFLYSKLTVDKSRWQQGNVFSCSVMHEALHNHYTQKSLSLSPGK

SEQ ID NO: 1199 - protein, 984 aa, Artificial Sequence
  Synthetic peptide
EVQLLESGGGMVQPGGSLRLSCAASGFTFSSYAMSWVRQAPGKGLEWVSAISGSGGRTFYAESVEGRFTISRDNSKNTLYLQMNSLRAEDTAVYYCAKHDYSNYPYFDYWGQGTLVTVSSGGGGSGGGGSGGGGSEIVLTQSPGTLSLSPGERATLSCRASQSIRSSYLAWYQQKPGQAPRLLIYGASSRATGIPDRFSGSGSGTDFTLTISRLEPEDFAVYYCQQYGDLPFTFGPGTKLEIKSGGGGSEVQLVESGGGLVQPGGSLKLSCAASGFTFNKYAMNWVRQAPGKGLEWVARIRSKYNNYATYYADSVKDRFTISRDDSKNTAYLQMNNLKTEDTAVYYCVRHGNFGNSYISYWAYWGQGTLVTVSSGGGGSGGGGSGGGGSQTVVTQEPSLTVSPGGTVTLTCGSSTGAVTSGNYPNWVQQKPGQAPRGLIGGTKFLAPGTPARFSGSLLGGKAALTLSGVQPEDEAEYYCVLWYSNRWVFGGGTKLTVLGGGGDKTHTCPPCPAPELLGGPSVFLFPPKPKDTLMISRTPEVTCVVVDVSHEDPEVKFNWYVDGVEVHNAKTKPCEEQYGSTYRCVSVLTVLHQDWLNGKEYKCKVSNKALPAPIEKTISKAKGQPREPQVYTLPPSREEMTKNQVSLTCLVKGFYPSDIAVEWESNGQPENNYKTTPPVLDSDGSFFLYSKLTVDKSRWQQGNVFSCSVMHEALHNHYTQKSLSLSPGGGGSGGGGSGGGGSGGGGSGGGGSGGGGSDKTHTCPPCPAPELLGGPSVFLFPPKPKDTLMISRTPEVTCVVVDVSHEDPEVKFNWYVDGVEVHNAKTKPCEEQYGSTYRCVSVLTVLHQDWLNGKEYKCKVSNKALPAPIEKTISKAKGQPREPQVYTLPPSREEMTKNQVSLTCLVKGFYPSDIAVEWESNGQPENNYKTTPPVLDSDGSFFLYSKLTVDKSRWQQGNVFSCSVMHEALHNHYTQKSLSLSPGK

SEQ ID NO: 1200 - protein, 984 aa, Artificial Sequence
  Synthetic peptide
EVQLLESGGGLVQSGGSLRLSCAASGFTFSSYAMSWVRQAPGKCLEWVSAISGSGGRTHYAESVKGRFTISRDNSKNTLYLQMNSLRAEDTAVYYCAKHDYSNYPYFDYWGQGTLVTVSSGGGGSGGGGSGGGGSEIVLTQSPGTLSLSPGERATLSCRASQSVRSSYLAWYQQKPGQAPRLLIYGASSRATGIPDRFSGSGSGTDFTLTISRLEPEDFAVYYCQQYGSSPFTFGCGTKLEIKSGGGGSEVQLVESGGGLVQPGGSLKLSCAASGFTFNKYAMNWVRQAPGKGLEWVARIRSKYNNYATYYADSVKDRFTISRDDSKNTAYLQMNNLKTEDTAVYYCVRHGNFGNSYISYWAYWGQGTLVTVSSGGGGSGGGGSGGGGSQTVVTQEPSLTVSPGGTVTLTCGSSTGAVTSGNYPNWVQQKPGQAPRGLIGGTKFLAPGTPARFSGSLLGGKAALTLSGVQPEDEAEYYCVLWYSNRWVFGGGTKLTVLGGGGDKTHTCPPCPAPELLGGPSVFLFPPKPKDTLMISRTPEVTCVVVDVSHEDPEVKFNWYVDGVEVHNAKTKPCEEQYGSTYRCVSVLTVLHQDWLNGKEYKCKVSNKALPAPIEKTISKAKGQPREPQVYTLPPSREEMTKNQVSLTCLVKGFYPSDIAVEWESNGQPENNYKTTPPVLDSDGSFFLYSKLTVDKSRWQQGNVFSCSVMHEALHNHYTQKSLSLSPGGGGSGGGGSGGGGSGGGGSGGGGSGGGGSDKTHTCPPCPAPELLGGPSVFLFPPKPKDTLMISRTPEVTCVVVDVSHEDPEVKFNWYVDGVEVHNAKTKPCEEQYGSTYRCVSVLTVLHQDWLNGKEYKCKVSNKALPAPIEKTISKAKGQPREPQVYTLPPSREEMTKNQVSLTCLVKGFYPSDIAVEWESNGQPENNYKTTPPVLDSDGSFFLYSKLTVDKSRWQQGNVFSCSVMHEALHNHYTQKSLSLSPGK

SEQ ID NO: 1201 - protein, 984 aa, Artificial Sequence
  Synthetic peptide
EVQLLESGGGLVQSGGSLRLSCAASGFTFSSYAMSWVRQAPGKGLEWVSAISGSGGRTHYAESVKGRFTISRDNSKNTLYLQMNSLRAEDTAVYYCAKHDYSNYPYFDYWGQGTLVTVSSGGGGSGGGGSGGGGSEIVLTQSPGTLSLSPGERATLSCRASQSVRSSYLAWYQQKPGQAPRLLIYGASSRATGIPDRFSGSGSGTDFTLTISRLEPEDFAVYYCQQYGSSPFTFGPGTKLEIKSGGGGSEVQLVESGGGLVQPGGSLKLSCAASGFTFNKYAMNWVRQAPGKGLEWVARIRSKYNNYATYYADSVKDRFTISRDDSKNTAYLQMNNLKTEDTAVYYCVRHGNFGNSYISYWAYWGQGTLVTVSSGGGGSGGGGSGGGGSQTVVTQEPSLTVSPGGTVTLTCGSSTGAVTSGNYPNWVQQKPGQAPRGLIGGTKFLAPGTPARFSGSLLGGKAALTLSGVQPEDEAEYYCVLWYSNRWVFGGGTKLTVLGGGGDKTHTCPPCPAPELLGGPSVFLFPPKPKDTLMISRTPEVTCVVVDVSHEDPEVKFNWYVDGVEVHNAKTKPCEEQYGSTYRCVSVLTVLHQDWLNGKEYKCKVSNKALPAPIEKTISKAKGQPREPQVYTLPPSREEMTKNQVSLTCLVKGFYPSDIAVEWESNGQPENNYKTTPPVLDSDGSFFLYSKLTVDKSRWQQGNVFSCSVMHEALHNHYTQKSLSLSPGGGGSGGGGSGGGGSGGGGSGGGGSGGGGSDKTHTCPPCPAPELLGGPSVFLFPPKPKDTLMISRTPEVTCVVVDVSHEDPEVKFNWYVDGVEVHNAKTKPCEEQYGSTYRCVSVLTVLHQDWLNGKEYKCKVSNKALPAPIEKTISKAKGQPREPQVYTLPPSREEMTKNQVSLTCLVKGFYPSDIAVEWESNGQPENNYKTTPPVLDSDGSFFLYSKLTVDKSRWQQGNVFSCSVMHEALHNHYTQKSLSLSPGK

SEQ ID NO: 1202 - protein, 984 aa, Artificial Sequence
  Synthetic peptide
EVQLLESGGGLVQPGGSLRLSCAASGFTFSSYAMSWVRQAPGKCLEWVSLISGSGGRTHYAESVKGRFTISRDNSKNTLYLQMNSLRAEDTAVYYCAKHDYSNYPYFDYWGQGTLVTVSSGGGGSGGGGSGGGGSEIVLTQSPGTLSLSPGERATLSCRASQSVRSTYLAWYQQKPGQAPRLLIYDASSRATGIPDRFSGSGSGTDFTLTISRLEPEDFAVYFCQQYGSSPPTFGCGTKLEIKSGGGGSEVQLVESGGGLVQPGGSLKLSCAASGFTFNKYAMNWVRQAPGKGLEWVARIRSKYNNYATYYADSVKDRFTISRDDSKNTAYLQMNNLKTEDTAVYYCVRHGNFGNSYISYWAYWGQGTLVTVSSGGGGSGGGGSGGGGSQTVVTQEPSLTVSPGGTVTLTCGSSTGAVTSGNYPNWVQQKPGQAPRGLIGGTKFLAPGTPARFSGSLLGGKAALTLSGVQPEDEAEYYCVLWYSNRWVFGGGTKLTVLGGGGDKTHTCPPCPAPELLGGPSVFLFPPKPKDTLMISRTPEVTCVVVDVSHEDPEVKFNWYVDGVEVHNAKTKPCEEQYGSTYRCVSVLTVLHQDWLNGKEYKCKVSNKALPAPIEKTISKAKGQPREPQVYTLPPSREEMTKNQVSLTCLVKGFYPSDIAVEWESNGQPENNYKTTPPVLDSDGSFFLYSKLTVDKSRWQQGNVFSCSVMHEALHNHYTQKSLSLSPGGGGSGGGGSGGGGSGGGGSGGGGSGGGGSDKTHTCPPCPAPELLGGPSVFLFPPKPKDTLMISRTPEVTCVVVDVSHEDPEVKFNWYVDGVEVHNAKTKPCEEQYGSTYRCVSVLTVLHQDWLNGKEYKCKVSNKALPAPIEKTISKAKGQPREPQVYTLPPSREEMTKNQVSLTCLVKGFYPSDIAVEWESNGQPENNYKTTPPVLDSDGSFFLYSKLTVDKSRWQQGNVFSCSVMHEALHNHYTQKSLSLSPGK

SEQ ID NO: 1203 - protein, 984 aa, Artificial Sequence
  Synthetic peptide
EVQLLESGGGLVQPGGSLRLSCAASGFTFSSYAMSWVRQAPGKGLEWVSLISGSGGRTHYAESVKGRFTISRDNSKNTLYLQMNSLRAEDTAVYYCAKHDYSNYPYFDYWGQGTLVTVSSGGGGSGGGGSGGGGSEIVLTQSPGTLSLSPGERATLSCRASQSVRSTYLAWYQQKPGQAPRLLIYDASSRATGIPDRFSGSGSGTDFTLTISRLEPEDFAVYFCQQYGSSPPTFGGGTKLEIKSGGGGSEVQLVESGGGLVQPGGSLKLSCAASGFTFNKYAMNWVRQAPGKGLEWVARIRSKYNNYATYYADSVKDRFTISRDDSKNTAYLQMNNLKTEDTAVYYCVRHGNFGNSYISYWAYWGQGTLVTVSSGGGGSGGGGSGGGGSQTVVTQEPSLTVSPGGTVTLTCGSSTGAVTSGNYPNWVQQKPGQAPRGLIGGTKFLAPGTPARFSGSLLGGKAALTLSGVQPEDEAEYYCVLWYSNRWVFGGGTKLTVLGGGGDKTHTCPPCPAPELLGGPSVFLFPPKPKDTLMISRTPEVTCVVVDVSHEDPEVKFNWYVDGVEVHNAKTKPCEEQYGSTYRCVSVLTVLHQDWLNGKEYKCKVSNKALPAPIEKTISKAKGQPREPQVYTLPPSREEMTKNQVSLTCLVKGFYPSDIAVEWESNGQPENNYKTTPPVLDSDGSFFLYSKLTVDKSRWQQGNVFSCSVMHEALHNHYTQKSLSLSPGGGGSGGGGSGGGGSGGGGSGGGGSGGGGSDKTHTCPPCPAPELLGGPSVFLFPPKPKDTLMISRTPEVTCVVVDVSHEDPEVKFNWYVDGVEVHNAKTKPCEEQYGSTYRCVSVLTVLHQDWLNGKEYKCKVSNKALPAPIEKTISKAKGQPREPQVYTLPPSREEMTKNQVSLTCLVKGFYPSDIAVEWESNGQPENNYKTTPPVLDSDGSFFLYSKLTVDKSRWQQGNVFSCSVMHEALHNHYTQKSLSLSPGK

SEQ ID NO: 1204 - protein, 984 aa, Artificial Sequence
  Synthetic peptide
EVQLLESGGGLVQPGGSLRLSCAASGFTFSTYAMSWVRQAPGKCLEWVSAISGSGGSTFYAESVKGRFTISRDNSKNTLSLQMNSLRAEDTAVYYCAKHDYSNYPYFDYWGQGTLVTVSSGGGGSGGGGSGGGGSEIVLTQSPGTLSLSPGERATLSCRASQSVRSSYLAWYQQKPGQAPRLLIYGASSRATGIPDRFSGSGSGTDFTLTISRLEPEDFAVYYCQQYGDLPFTFGCGTKLEIKSGGGGSEVQLVESGGGLVQPGGSLKLSCAASGFTFNKYAMNWVRQAPGKGLEWVARIRSKYNNYATYYADSVKDRFTISRDDSKNTAYLQMNNLKTEDTAVYYCVRHGNFGNSYISYWAYWGQGTLVTVSSGGGGSGGGGSGGGGSQTVVTQEPSLTVSPGGTVTLTCGSSTGAVTSGNYPNWVQQKPGQAPRGLIGGTKFLAPGTPARFSGSLLGGKAALTLSGVQPEDEAEYYCVLWYSNRWVFGGGTKLTVLGGGGDKTHTCPPCPAPELLGGPSVFLFPPKPKDTLMISRTPEVTCVVVDVSHEDPEVKFNWYVDGVEVHNAKTKPCEEQYGSTYRCVSVLTVLHQDWLNGKEYKCKVSNKALPAPIEKTISKAKGQPREPQVYTLPPSREEMTKNQVSLTCLVKGFYPSDIAVEWESNGQPENNYKTTPPVLDSDGSFFLYSKLTVDKSRWQQGNVFSCSVMHEALHNHYTQKSLSLSPGGGGSGGGGSGGGGSGGGGSGGGGSGGGGSDKTHTCPPCPAPELLGGPSVFLFPPKPKDTLMISRTPEVTCVVVDVSHEDPEVKFNWYVDGVEVHNAKTKPCEEQYGSTYRCVSVLTVLHQDWLNGKEYKCKVSNKALPAPIEKTISKAKGQPREPQVYTLPPSREEMTKNQVSLTCLVKGFYPSDIAVEWESNGQPENNYKTTPPVLDSDGSFFLYSKLTVDKSRWQQGNVFSCSVMHEALHNHYTQKSLSLSPGK

SEQ ID NO: 1205 - protein, 984 aa, Artificial Sequence
  Synthetic peptide
EVQLLESGGGLVQPGGSLRLSCAASGFTFSTYAMSWVRQAPGKGLEWVSAISGSGGSTFYAESVKGRFTISRDNSKNTLSLQMNSLRAEDTAVYYCAKHDYSNYPYFDYWGQGTLVTVSSGGGGSGGGGSGGGGSEIVLTQSPGTLSLSPGERATLSCRASQSVRSSYLAWYQQKPGQAPRLLIYGASSRATGIPDRFSGSGSGTDFTLTISRLEPEDFAVYYCQQYGDLPFTFGPGTKLEIKSGGGGSEVQLVESGGGLVQPGGSLKLSCAASGFTFNKYAMNWVRQAPGKGLEWVARIRSKYNNYATYYADSVKDRFTISRDDSKNTAYLQMNNLKTEDTAVYYCVRHGNFGNSYISYWAYWGQGTLVTVSSGGGGSGGGGSGGGGSQTVVTQEPSLTVSPGGTVTLTCGSSTGAVTSGNYPNWVQQKPGQAPRGLIGGTKFLAPGTPARFSGSLLGGKAALTLSGVQPEDEAEYYCVLWYSNRWVFGGGTKLTVLGGGGDKTHTCPPCPAPELLGGPSVFLFPPKPKDTLMISRTPEVTCVVVDVSHEDPEVKFNWYVDGVEVHNAKTKPCEEQYGSTYRCVSVLTVLHQDWLNGKEYKCKVSNKALPAPIEKTISKAKGQPREPQVYTLPPSREEMTKNQVSLTCLVKGFYPSDIAVEWESNGQPENNYKTTPPVLDSDGSFFLYSKLTVDKSRWQQGNVFSCSVMHEALHNHYTQKSLSLSPGGGGSGGGGSGGGGSGGGGSGGGGSGGGGSDKTHTCPPCPAPELLGGPSVFLFPPKPKDTLMISRTPEVTCVVVDVSHEDPEVKFNWYVDGVEVHNAKTKPCEEQYGSTYRCVSVLTVLHQDWLNGKEYKCKVSNKALPAPIEKTISKAKGQPREPQVYTLPPSREEMTKNQVSLTCLVKGFYPSDIAVEWESNGQPENNYKTTPPVLDSDGSFFLYSKLTVDKSRWQQGNVFSCSVMHEALHNHYTQKSLSLSPGK

SEQ ID NO: 1206 - protein, 984 aa, Artificial Sequence
  Synthetic peptide
EVQLLESGGGMVQPGGSLRLSCAASGFTFSTYAMSWVRQAPGKCLEWVSAISGSGGRTFYAESVEGRFTISRDNSKNTLYLQMNSLRAEDTAVYYCAKHDYSNYPYFDYWGQGTLVTVSSGGGGSGGGGSGGGGSEIVLTQSPGTLSLSPGERATLSCRASQSVRSTYLAWYQQKPGQAPRLLIYGASSRATGIPDRFSGSGSGTDFTLTISRLEPEDFAVYSCQQYGDLPFTFGCGTKLEIKSGGGGSEVQLVESGGGLVQPGGSLKLSCAASGFTFNKYAMNWVRQAPGKGLEWVARIRSKYNNYATYYADSVKDRFTISRDDSKNTAYLQMNNLKTEDTAVYYCVRHGNFGNSYISYWAYWGQGTLVTVSSGGGGSGGGGSGGGGSQTVVTQEPSLTVSPGGTVTLTCGSSTGAVTSGNYPNWVQQKPGQAPRGLIGGTKFLAPGTPARFSGSLLGGKAALTLSGVQPEDEAEYYCVLWYSNRWVFGGGTKLTVLGGGGDKTHTCPPCPAPELLGGPSVFLFPPKPKDTLMISRTPEVTCVVVDVSHEDPEVKFNWYVDGVEVHNAKTKPCEEQYGSTYRCVSVLTVLHQDWLNGKEYKCKVSNKALPAPIEKTISKAKGQPREPQVYTLPPSREEMTKNQVSLTCLVKGFYPSDIAVEWESNGQPENNYKTTPPVLDSDGSFFLYSKLTVDKSRWQQGNVFSCSVMHEALHNHYTQKSLSLSPGGGGSGGGGSGGGGSGGGGSGGGGSGGGGSDKTHTCPPCPAPELLGGPSVFLFPPKPKDTLMISRTPEVTCVVVDVSHEDPEVKFNWYVDGVEVHNAKTKPCEEQYGSTYRCVSVLTVLHQDWLNGKEYKCKVSNKALPAPIEKTISKAKGQPREPQVYTLPPSREEMTKNQVSLTCLVKGFYPSDIAVEWESNGQPENNYKTTPPVLDSDGSFFLYSKLTVDKSRWQQGNVFSCSVMHEALHNHYTQKSLSLSPGK

SEQ ID NO: 1207 - protein, 984 aa, Artificial Sequence
  Synthetic peptide
EVQLLESGGGMVQPGGSLRLSCAASGFTFSTYAMSWVRQAPGKGLEWVSAISGSGGRTFYAESVEGRFTISRDNSKNTLYLQMNSLRAEDTAVYYCAKHDYSNYPYFDYWGQGTLVTVSSGGGGSGGGGSGGGGSEIVLTQSPGTLSLSPGERATLSCRASQSVRSTYLAWYQQKPGQAPRLLIYGASSRATGIPDRFSGSGSGTDFTLTISRLEPEDFAVYSCQQYGDLPFTFGPGTKLEIKSGGGGSEVQLVESGGGLVQPGGSLKLSCAASGFTFNKYAMNWVRQAPGKGLEWVARIRSKYNNYATYYADSVKDRFTISRDDSKNTAYLQMNNLKTEDTAVYYCVRHGNFGNSYISYWAYWGQGTLVTVSSGGGGSGGGGSGGGGSQTVVTQEPSLTVSPGGTVTLTCGSSTGAVTSGNYPNWVQQKPGQAPRGLIGGTKFLAPGTPARFSGSLLGGKAALTLSGVQPEDEAEYYCVLWYSNRWVFGGGTKLTVLGGGGDKTHTCPPCPAPELLGGPSVFLFPPKPKDTLMISRTPEVTCVVVDVSHEDPEVKFNWYVDGVEVHNAKTKPCEEQYGSTYRCVSVLTVLHQDWLNGKEYKCKVSNKALPAPIEKTISKAKGQPREPQVYTLPPSREEMTKNQVSLTCLVKGFYPSDIAVEWESNGQPENNYKTTPPVLDSDGSFFLYSKLTVDKSRWQQGNVFSCSVMHEALHNHYTQKSLSLSPGGGGSGGGGSGGGGSGGGGSGGGGSGGGGSDKTHTCPPCPAPELLGGPSVFLFPPKPKDTLMISRTPEVTCVVVDVSHEDPEVKFNWYVDGVEVHNAKTKPCEEQYGSTYRCVSVLTVLHQDWLNGKEYKCKVSNKALPAPIEKTISKAKGQPREPQVYTLPPSREEMTKNQVSLTCLVKGFYPSDIAVEWESNGQPENNYKTTPPVLDSDGSFFLYSKLTVDKSRWQQGNVFSCSVMHEALHNHYTQKSLSLSPGK

SEQ ID NO: 1208 - protein, 984 aa, Artificial Sequence
  Synthetic peptide
EVQLLESGGGLVQPGGSLRLSCAASGFTFSSYAMSWVRQAPGKCLEWVSAISGSGGYTYYAESVKGRFTISRDNSKNTLYLQMNSLRAEDTAVYYCAKHDYSNYPYFDYWGQGTLVTVSSGGGGSGGGGSGGGGSEIVLTQSPGTLSLSPGERATLSCRASQSVRSNYLAWYQQKPGQAPRLLIYGASSRATGIPDRFSGSGSGTDFTLTISRLEPEDFAVYYCQQYGDLPFTFGCGTKVEIKSGGGGSEVQLVESGGGLVQPGGSLKLSCAASGFTFNKYAMNWVRQAPGKGLEWVARIRSKYNNYATYYADSVKDRFTISRDDSKNTAYLQMNNLKTEDTAVYYCVRHGNFGNSYISYWAYWGQGTLVTVSSGGGGSGGGGSGGGGSQTVVTQEPSLTVSPGGTVTLTCGSSTGAVTSGNYPNWVQQKPGQAPRGLIGGTKFLAPGTPARFSGSLLGGKAALTLSGVQPEDEAEYYCVLWYSNRWVFGGGTKLTVLGGGGDKTHTCPPCPAPELLGGPSVFLFPPKPKDTLMISRTPEVTCVVVDVSHEDPEVKFNWYVDGVEVHNAKTKPCEEQYGSTYRCVSVLTVLHQDWLNGKEYKCKVSNKALPAPIEKTISKAKGQPREPQVYTLPPSREEMTKNQVSLTCLVKGFYPSDIAVEWESNGQPENNYKTTPPVLDSDGSFFLYSKLTVDKSRWQQGNVFSCSVMHEALHNHYTQKSLSLSPGGGGSGGGGSGGGGSGGGGSGGGGSGGGGSDKTHTCPPCPAPELLGGPSVFLFPPKPKDTLMISRTPEVTCVVVDVSHEDPEVKFNWYVDGVEVHNAKTKPCEEQYGSTYRCVSVLTVLHQDWLNGKEYKCKVSNKALPAPIEKTISKAKGQPREPQVYTLPPSREEMTKNQVSLTCLVKGFYPSDIAVEWESNGQPENNYKTTPPVLDSDGSFFLYSKLTVDKSRWQQGNVFSCSVMHEALHNHYTQKSLSLSPGK

SEQ ID NO: 1209 - protein, 984 aa, Artificial Sequence
  Synthetic peptide
EVQLLESGGGLVQPGGSLRLSCAASGFTFSSYAMSWVRQAPGKGLEWVSAISGSGGYTYYAESVKGRFTISRDNSKNTLYLQMNSLRAEDTAVYYCAKHDYSNYPYFDYWGQGTLVTVSSGGGGSGGGGSGGGGSEIVLTQSPGTLSLSPGERATLSCRASQSVRSNYLAWYQQKPGQAPRLLIYGASSRATGIPDRFSGSGSGTDFTLTISRLEPEDFAVYYCQQYGDLPFTFGPGTKVEIKSGGGGSEVQLVESGGGLVQPGGSLKLSCAASGFTFNKYAMNWVRQAPGKGLEWVARIRSKYNNYATYYADSVKDRFTISRDDSKNTAYLQMNNLKTEDTAVYYCVRHGNFGNSYISYWAYWGQGTLVTVSSGGGGSGGGGSGGGGSQTVVTQEPSLTVSPGGTVTLTCGSSTGAVTSGNYPNWVQQKPGQAPRGLIGGTKFLAPGTPARFSGSLLGGKAALTLSGVQPEDEAEYYCVLWYSNRWVFGGGTKLTVLGGGGDKTHTCPPCPAPELLGGPSVFLFPPKPKDTLMISRTPEVTCVVVDVSHEDPEVKFNWYVDGVEVHNAKTKPCEEQYGSTYRCVSVLTVLHQDWLNGKEYKCKVSNKALPAPIEKTISKAKGQPREPQVYTLPPSREEMTKNQVSLTCLVKGFYPSDIAVEWESNGQPENNYKTTPPVLDSDGSFFLYSKLTVDKSRWQQGNVFSCSVMHEALHNHYTQKSLSLSPGGGGSGGGGSGGGGSGGGGSGGGGSGGGGSDKTHTCPPCPAPELLGGPSVFLFPPKPKDTLMISRTPEVTCVVVDVSHEDPEVKFNWYVDGVEVHNAKTKPCEEQYGSTYRCVSVLTVLHQDWLNGKEYKCKVSNKALPAPIEKTISKAKGQPREPQVYTLPPSREEMTKNQVSLTCLVKGFYPSDIAVEWESNGQPENNYKTTPPVLDSDGSFFLYSKLTVDKSRWQQGNVFSCSVMHEALHNHYTQKSLSLSPGK

SEQ ID NO: 1210 - protein, 984 aa, Artificial Sequence
  Synthetic peptide
EVQLLESGGGLAQPGGSLRLSCAASGFTFSSYAMSWVRQAPGKCLEWVSAISGSGGSTFYAESVKGRFTISRDNSKNTLYLQMNSLRAEDTAVYFCAKHDYSNYPYFDYWGQGTLVTVSSGGGGSGGGGSGGGGSEIVLTQSPGTLSLSPGERATLSCRASQSVRSSYLAWYQQKPGQAPRLLIYGASSRATGIPDRFSGSGSGTDFTLTISRLEPEDFAVYYCQQYGDLPFTFGCGTKVEIKSGGGGSEVQLVESGGGLVQPGGSLKLSCAASGFTFNKYAMNWVRQAPGKGLEWVARIRSKYNNYATYYADSVKDRFTISRDDSKNTAYLQMNNLKTEDTAVYYCVRHGNFGNSYISYWAYWGQGTLVTVSSGGGGSGGGGSGGGGSQTVVTQEPSLTVSPGGTVTLTCGSSTGAVTSGNYPNWVQQKPGQAPRGLIGGTKFLAPGTPARFSGSLLGGKAALTLSGVQPEDEAEYYCVLWYSNRWVFGGGTKLTVLGGGGDKTHTCPPCPAPELLGGPSVFLFPPKPKDTLMISRTPEVTCVVVDVSHEDPEVKFNWYVDGVEVHNAKTKPCEEQYGSTYRCVSVLTVLHQDWLNGKEYKCKVSNKALPAPIEKTISKAKGQPREPQVYTLPPSREEMTKNQVSLTCLVKGFYPSDIAVEWESNGQPENNYKTTPPVLDSDGSFFLYSKLTVDKSRWQQGNVFSCSVMHEALHNHYTQKSLSLSPGGGGSGGGGSGGGGSGGGGSGGGGSGGGGSDKTHTCPPCPAPELLGGPSVFLFPPKPKDTLMISRTPEVTCVVVDVSHEDPEVKFNWYVDGVEVHNAKTKPCEEQYGSTYRCVSVLTVLHQDWLNGKEYKCKVSNKALPAPIEKTISKAKGQPREPQVYTLPPSREEMTKNQVSLTCLVKGFYPSDIAVEWESNGQPENNYKTTPPVLDSDGSFFLYSKLTVDKSRWQQGNVFSCSVMHEALHNHYTQKSLSLSPGK

SEQ ID NO: 1211 - protein, 984 aa, Artificial Sequence
  Synthetic peptide
EVQLLESGGGLAQPGGSLRLSCAASGFTFSSYAMSWVRQAPGKGLEWVSAISGSGGSTFYAESVKGRFTISRDNSKNTLYLQMNSLRAEDTAVYFCAKHDYSNYPYFDYWGQGTLVTVSSGGGGSGGGGSGGGGSEIVLTQSPGTLSLSPGERATLSCRASQSVRSSYLAWYQQKPGQAPRLLIYGASSRATGIPDRFSGSGSGTDFTLTISRLEPEDFAVYYCQQYGDLPFTFGPGTKVEIKSGGGGSEVQLVESGGGLVQPGGSLKLSCAASGFTFNKYAMNWVRQAPGKGLEWVARIRSKYNNYATYYADSVKDRFTISRDDSKNTAYLQMNNLKTEDTAVYYCVRHGNFGNSYISYWAYWGQGTLVTVSSGGGGSGGGGSGGGGSQTVVTQEPSLTVSPGGTVTLTCGSSTGAVTSGNYPNWVQQKPGQAPRGLIGGTKFLAPGTPARFSGSLLGGKAALTLSGVQPEDEAEYYCVLWYSNRWVFGGGTKLTVLGGGGDKTHTCPPCPAPELLGGPSVFLFPPKPKDTLMISRTPEVTCVVVDVSHEDPEVKFNWYVDGVEVHNAKTKPCEEQYGSTYRCVSVLTVLHQDWLNGKEYKCKVSNKALPAPIEKTISKAKGQPREPQVYTLPPSREEMTKNQVSLTCLVKGFYPSDIAVEWESNGQPENNYKTTPPVLDSDGSFFLYSKLTVDKSRWQQGNVFSCSVMHEALHNHYTQKSLSLSPGGGGSGGGGSGGGGSGGGGSGGGGSGGGGSDKTHTCPPCPAPELLGGPSVFLFPPKPKDTLMISRTPEVTCVVVDVSHEDPEVKFNWYVDGVEVHNAKTKPCEEQYGSTYRCVSVLTVLHQDWLNGKEYKCKVSNKALPAPIEKTISKAKGQPREPQVYTLPPSREEMTKNQVSLTCLVKGFYPSDIAVEWESNGQPENNYKTTPPVLDSDGSFFLYSKLTVDKSRWQQGNVFSCSVMHEALHNHYTQKSLSLSPGK

SEQ ID NO: 1212 - protein, 984 aa, Artificial Sequence
  Synthetic peptide
EVQLLESGGGMVQPGGSLRLSCAASGFTFSSYAMSWVRQAPGKCLEWVSAISGSGGRTFYAESVEGRFTISRDNSKNTLYLQMNSLRAEDTAVYYCAKHDYSNYPYFDYWGQGTLVTVSSGGGGSGGGGSGGGGSEIVLTQSPGTLSLSPGERATLSCRASQSVRSNYLAWYQQKPGQAPRLLIYGASSRATGIPDRFSGSGSGTDFTLTISRLEPEDFAVYYCQQYGDLPFTFGCGTKVEIKSGGGGSEVQLVESGGGLVQPGGSLKLSCAASGFTFNKYAMNWVRQAPGKGLEWVARIRSKYNNYATYYADSVKDRFTISRDDSKNTAYLQMNNLKTEDTAVYYCVRHGNFGNSYISYWAYWGQGTLVTVSSGGGGSGGGGSGGGGSQTVVTQEPSLTVSPGGTVTLTCGSSTGAVTSGNYPNWVQQKPGQAPRGLIGGTKFLAPGTPARFSGSLLGGKAALTLSGVQPEDEAEYYCVLWYSNRWVFGGGTKLTVLGGGGDKTHTCPPCPAPELLGGPSVFLFPPKPKDTLMISRTPEVTCVVVDVSHEDPEVKFNWYVDGVEVHNAKTKPCEEQYGSTYRCVSVLTVLHQDWLNGKEYKCKVSNKALPAPIEKTISKAKGQPREPQVYTLPPSREEMTKNQVSLTCLVKGFYPSDIAVEWESNGQPENNYKTTPPVLDSDGSFFLYSKLTVDKSRWQQGNVFSCSVMHEALHNHYTQKSLSLSPGGGGSGGGGSGGGGSGGGGSGGGGSGGGGSDKTHTCPPCPAPELLGGPSVFLFPPKPKDTLMISRTPEVTCVVVDVSHEDPEVKFNWYVDGVEVHNAKTKPCEEQYGSTYRCVSVLTVLHQDWLNGKEYKCKVSNKALPAPIEKTISKAKGQPREPQVYTLPPSREEMTKNQVSLTCLVKGFYPSDIAVEWESNGQPENNYKTTPPVLDSDGSFFLYSKLTVDKSRWQQGNVFSCSVMHEALHNHYTQKSLSLSPGK

SEQ ID NO: 1213 - protein, 984 aa, Artificial Sequence
  Synthetic peptide
EVQLLESGGGMVQPGGSLRLSCAASGFTFSSYAMSWVRQAPGKGLEWVSAISGSGGRTFYAESVEGRFTISRDNSKNTLYLQMNSLRAEDTAVYYCAKHDYSNYPYFDYWGQGTLVTVSSGGGGSGGGGSGGGGSEIVLTQSPGTLSLSPGERATLSCRASQSVRSNYLAWYQQKPGQAPRLLIYGASSRATGIPDRFSGSGSGTDFTLTISRLEPEDFAVYYCQQYGDLPFTFGPGTKVEIKSGGGGSEVQLVESGGGLVQPGGSLKLSCAASGFTFNKYAMNWVRQAPGKGLEWVARIRSKYNNYATYYADSVKDRFTISRDDSKNTAYLQMNNLKTEDTAVYYCVRHGNFGNSYISYWAYWGQGTLVTVSSGGGGSGGGGSGGGGSQTVVTQEPSLTVSPGGTVTLTCGSSTGAVTSGNYPNWVQQKPGQAPRGLIGGTKFLAPGTPARFSGSLLGGKAALTLSGVQPEDEAEYYCVLWYSNRWVFGGGTKLTVLGGGGDKTHTCPPCPAPELLGGPSVFLFPPKPKDTLMISRTPEVTCVVVDVSHEDPEVKFNWYVDGVEVHNAKTKPCEEQYGSTYRCVSVLTVLHQDWLNGKEYKCKVSNKALPAPIEKTISKAKGQPREPQVYTLPPSREEMTKNQVSLTCLVKGFYPSDIAVEWESNGQPENNYKTTPPVLDSDGSFFLYSKLTVDKSRWQQGNVFSCSVMHEALHNHYTQKSLSLSPGGGGSGGGGSGGGGSGGGGSGGGGSGGGGSDKTHTCPPCPAPELLGGPSVFLFPPKPKDTLMISRTPEVTCVVVDVSHEDPEVKFNWYVDGVEVHNAKTKPCEEQYGSTYRCVSVLTVLHQDWLNGKEYKCKVSNKALPAPIEKTISKAKGQPREPQVYTLPPSREEMTKNQVSLTCLVKGFYPSDIAVEWESNGQPENNYKTTPPVLDSDGSFFLYSKLTVDKSRWQQGNVFSCSVMHEALHNHYTQKSLSLSPGK

SEQ ID NO: 1214 - protein, 984 aa, Artificial Sequence
  Synthetic peptide
EVQLLESGGGMVQPGGSLRLSCAASGFTFSSYAMSWVRQAPGKCLEWVSAISGSGGRTFYAESVEGRFTISRDNSKNTLYLQMNSLRAEDTAVYYCAKHDYSNYPYFDYWGQGTLVTVSSGGGGSGGGGSGGGGSEIVLTQSPGTLSLSPGERATLSCRASQSVRSSYLAWYQQKPGQAPRLLIYGASSRATGIPDRFSGSGSGTDFTLTISRLEPEDFAVYYCQQYGSSPFTFGCGTKVEIKSGGGGSEVQLVESGGGLVQPGGSLKLSCAASGFTFNKYAMNWVRQAPGKGLEWVARIRSKYNNYATYYADSVKDRFTISRDDSKNTAYLQMNNLKTEDTAVYYCVRHGNFGNSYISYWAYWGQGTLVTVSSGGGGSGGGGSGGGGSQTVVTQEPSLTVSPGGTVTLTCGSSTGAVTSGNYPNWVQQKPGQAPRGLIGGTKFLAPGTPARFSGSLLGGKAALTLSGVQPEDEAEYYCVLWYSNRWVFGGGTKLTVLGGGGDKTHTCPPCPAPELLGGPSVFLFPPKPKDTLMISRTPEVTCVVVDVSHEDPEVKFNWYVDGVEVHNAKTKPCEEQYGSTYRCVSVLTVLHQDWLNGKEYKCKVSNKALPAPIEKTISKAKGQPREPQVYTLPPSREEMTKNQVSLTCLVKGFYPSDIAVEWESNGQPENNYKTTPPVLDSDGSFFLYSKLTVDKSRWQQGNVFSCSVMHEALHNHYTQKSLSLSPGGGGSGGGGSGGGGSGGGGSGGGGSGGGGSDKTHTCPPCPAPELLGGPSVFLFPPKPKDTLMISRTPEVTCVVVDVSHEDPEVKFNWYVDGVEVHNAKTKPCEEQYGSTYRCVSVLTVLHQDWLNGKEYKCKVSNKALPAPIEKTISKAKGQPREPQVYTLPPSREEMTKNQVSLTCLVKGFYPSDIAVEWESNGQPENNYKTTPPVLDSDGSFFLYSKLTVDKSRWQQGNVFSCSVMHEALHNHYTQKSLSLSPGK

SEQ ID NO: 1215 - protein, 984 aa, Artificial Sequence
  Synthetic peptide
EVQLLESGGGMVQPGGSLRLSCAASGFTFSSYAMSWVRQAPGKGLEWVSAISGSGGRTFYAESVEGRFTISRDNSKNTLYLQMNSLRAEDTAVYYCAKHDYSNYPYFDYWGQGTLVTVSSGGGGSGGGGSGGGGSEIVLTQSPGTLSLSPGERATLSCRASQSVRSSYLAWYQQKPGQAPRLLIYGASSRATGIPDRFSGSGSGTDFTLTISRLEPEDFAVYYCQQYGSSPFTFGPGTKVEIKSGGGGSEVQLVESGGGLVQPGGSLKLSCAASGFTFNKYAMNWVRQAPGKGLEWVARIRSKYNNYATYYADSVKDRFTISRDDSKNTAYLQMNNLKTEDTAVYYCVRHGNFGNSYISYWAYWGQGTLVTVSSGGGGSGGGGSGGGGSQTVVTQEPSLTVSPGGTVTLTCGSSTGAVTSGNYPNWVQQKPGQAPRGLIGGTKFLAPGTPARFSGSLLGGKAALTLSGVQPEDEAEYYCVLWYSNRWVFGGGTKLTVLGGGGDKTHTCPPCPAPELLGGPSVFLFPPKPKDTLMISRTPEVTCVVVDVSHEDPEVKFNWYVDGVEVHNAKTKPCEEQYGSTYRCVSVLTVLHQDWLNGKEYKCKVSNKALPAPIEKTISKAKGQPREPQVYTLPPSREEMTKNQVSLTCLVKGFYPSDIAVEWESNGQPENNYKTTPPVLDSDGSFFLYSKLTVDKSRWQQGNVFSCSVMHEALHNHYTQKSLSLSPGGGGSGGGGSGGGGSGGGGSGGGGSGGGGSDKTHTCPPCPAPELLGGPSVFLFPPKPKDTLMISRTPEVTCVVVDVSHEDPEVKFNWYVDGVEVHNAKTKPCEEQYGSTYRCVSVLTVLHQDWLNGKEYKCKVSNKALPAPIEKTISKAKGQPREPQVYTLPPSREEMTKNQVSLTCLVKGFYPSDIAVEWESNGQPENNYKTTPPVLDSDGSFFLYSKLTVDKSRWQQGNVFSCSVMHEALHNHYTQKSLSLSPGK

SEQ ID NO: 1216 - protein, 984 aa, Artificial Sequence
  Synthetic peptide
EVQLLESGGGLVQPGGSLRLSCAASGFTFSSYAMSWVRQAPGKCLEWVSAISGSGGSTFYAESVQGRFTISRDNSKNTLYLQVNSLRAEDTAVYYCARHDYSNYPYFDYWGQGTLVTVSSGGGGSGGGGSGGGGSEIVLTQSPGTLSLSPGERATLSCRASQSVRGNYLAWYQQKPGQAPRLLIYGASSRATGIPDRFSGSGSGTDFTLTISRLEPEDFAVYYCQQYGYSPFTFGCGTKVEIKSGGGGSEVQLVESGGGLVQPGGSLKLSCAASGFTFNKYAMNWVRQAPGKGLEWVARIRSKYNNYATYYADSVKDRFTISRDDSKNTAYLQMNNLKTEDTAVYYCVRHGNFGNSYISYWAYWGQGTLVTVSSGGGGSGGGGSGGGGSQTVVTQEPSLTVSPGGTVTLTCGSSTGAVTSGNYPNWVQQKPGQAPRGLIGGTKFLAPGTPARFSGSLLGGKAALTLSGVQPEDEAEYYCVLWYSNRWVFGGGTKLTVLGGGGDKTHTCPPCPAPELLGGPSVFLFPPKPKDTLMISRTPEVTCVVVDVSHEDPEVKFNWYVDGVEVHNAKTKPCEEQYGSTYRCVSVLTVLHQDWLNGKEYKCKVSNKALPAPIEKTISKAKGQPREPQVYTLPPSREEMTKNQVSLTCLVKGFYPSDIAVEWESNGQPENNYKTTPPVLDSDGSFFLYSKLTVDKSRWQQGNVFSCSVMHEALHNHYTQKSLSLSPGGGGSGGGGSGGGGSGGGGSGGGGSGGGGSDKTHTCPPCPAPELLGGPSVFLFPPKPKDTLMISRTPEVTCVVVDVSHEDPEVKFNWYVDGVEVHNAKTKPCEEQYGSTYRCVSVLTVLHQDWLNGKEYKCKVSNKALPAPIEKTISKAKGQPREPQVYTLPPSREEMTKNQVSLTCLVKGFYPSDIAVEWESNGQPENNYKTTPPVLDSDGSFFLYSKLTVDKSRWQQGNVFSCSVMHEALHNHYTQKSLSLSPGK

SEQ ID NO: 1217 - protein, 984 aa, Artificial Sequence
  Synthetic peptide
EVQLLESGGGLVQPGGSLRLSCAASGFTFSSYAMSWVRQAPGKGLEWVSAISGSGGSTFYAESVQGRFTISRDNSKNTLYLQVNSLRAEDTAVYYCARHDYSNYPYFDYWGQGTLVTVSSGGGGSGGGGSGGGGSEIVLTQSPGTLSLSPGERATLSCRASQSVRGNYLAWYQQKPGQAPRLLIYGASSRATGIPDRFSGSGSGTDFTLTISRLEPEDFAVYYCQQYGYSPFTFGPGTKVEIKSGGGGSEVQLVESGGGLVQPGGSLKLSCAASGFTFNKYAMNWVRQAPGKGLEWVARIRSKYNNYATYYADSVKDRFTISRDDSKNTAYLQMNNLKTEDTAVYYCVRHGNFGNSYISYWAYWGQGTLVTVSSGGGGSGGGGSGGGGSQTVVTQEPSLTVSPGGTVTLTCGSSTGAVTSGNYPNWVQQKPGQAPRGLIGGTKFLAPGTPARFSGSLLGGKAALTLSGVQPEDEAEYYCVLWYSNRWVFGGGTKLTVLGGGGDKTHTCPPCPAPELLGGPSVFLFPPKPKDTLMISRTPEVTCVVVDVSHEDPEVKFNWYVDGVEVHNAKTKPCEEQYGSTYRCVSVLTVLHQDWLNGKEYKCKVSNKALPAPIEKTISKAKGQPREPQVYTLPPSREEMTKNQVSLTCLVKGFYPSDIAVEWESNGQPENNYKTTPPVLDSDGSFFLYSKLTVDKSRWQQGNVFSCSVMHEALHNHYTQKSLSLSPGGGGSGGGGSGGGGSGGGGSGGGGSGGGGSDKTHTCPPCPAPELLGGPSVFLFPPKPKDTLMISRTPEVTCVVVDVSHEDPEVKFNWYVDGVEVHNAKTKPCEEQYGSTYRCVSVLTVLHQDWLNGKEYKCKVSNKALPAPIEKTISKAKGQPREPQVYTLPPSREEMTKNQVSLTCLVKGFYPSDIAVEWESNGQPENNYKTTPPVLDSDGSFFLYSKLTVDKSRWQQGNVFSCSVMHEALHNHYTQKSLSLSPGK

SEQ ID NO: 1218 - protein, 984 aa, Artificial Sequence
  Synthetic peptide
EVQLLESGGGLVQPGGSLRLSCAASGFTFSTYAMSWVRQAPGKCLEWVSAISGSGGGTFYAESVKGRFTISRDNSKNTLYLQMNSLRAEDTAVYYCAKHDYSNYPYFDYWGQGTLVTVSSGGGGSGGGGSGGGGSEIVLTQSPGTLSLSPGERATLSCRASQSIRSNYLAWYQQKPGQAPRLLIYGASSRATGIPDRFSGSGSGTDFTLTISRLEPEDFAVYYCQQYGSSPFTFGCGTKVEIKSGGGGSEVQLVESGGGLVQPGGSLKLSCAASGFTFNKYAMNWVRQAPGKGLEWVARIRSKYNNYATYYADSVKDRFTISRDDSKNTAYLQMNNLKTEDTAVYYCVRHGNFGNSYISYWAYWGQGTLVTVSSGGGGSGGGGSGGGGSQTVVTQEPSLTVSPGGTVTLTCGSSTGAVTSGNYPNWVQQKPGQAPRGLIGGTKFLAPGTPARFSGSLLGGKAALTLSGVQPEDEAEYYCVLWYSNRWVFGGGTKLTVLGGGGDKTHTCPPCPAPELLGGPSVFLFPPKPKDTLMISRTPEVTCVVVDVSHEDPEVKFNWYVDGVEVHNAKTKPCEEQYGSTYRCVSVLTVLHQDWLNGKEYKCKVSNKALPAPIEKTISKAKGQPREPQVYTLPPSREEMTKNQVSLTCLVKGFYPSDIAVEWESNGQPENNYKTTPPVLDSDGSFFLYSKLTVDKSRWQQGNVFSCSVMHEALHNHYTQKSLSLSPGGGGSGGGGSGGGGSGGGGSGGGGSGGGGSDKTHTCPPCPAPELLGGPSVFLFPPKPKDTLMISRTPEVTCVVVDVSHEDPEVKFNWYVDGVEVHNAKTKPCEEQYGSTYRCVSVLTVLHQDWLNGKEYKCKVSNKALPAPIEKTISKAKGQPREPQVYTLPPSREEMTKNQVSLTCLVKGFYPSDIAVEWESNGQPENNYKTTPPVLDSDGSFFLYSKLTVDKSRWQQGNVFSCSVMHEALHNHYTQKSLSLSPGK

SEQ ID NO: 1219 - protein, 984 aa, Artificial Sequence
  Synthetic peptide
EVQLLESGGGLVQPGGSLRLSCAASGFTFSTYAMSWVRQAPGKGLEWVSAISGSGGGTFYAESVKGRFTISRDNSKNTLYLQMNSLRAEDTAVYYCAKHDYSNYPYFDYWGQGTLVTVSSGGGGSGGGGSGGGGSEIVLTQSPGTLSLSPGERATLSCRASQSIRSNYLAWYQQKPGQAPRLLIYGASSRATGIPDRFSGSGSGTDFTLTISRLEPEDFAVYYCQQYGSSPFTFGPGTKVEIKSGGGGSEVQLVESGGGLVQPGGSLKLSCAASGFTFNKYAMNWVRQAPGKGLEWVARIRSKYNNYATYYADSVKDRFTISRDDSKNTAYLQMNNLKTEDTAVYYCVRHGNFGNSYISYWAYWGQGTLVTVSSGGGGSGGGGSGGGGSQTVVTQEPSLTVSPGGTVTLTCGSSTGAVTSGNYPNWVQQKPGQAPRGLIGGTKFLAPGTPARFSGSLLGGKAALTLSGVQPEDEAEYYCVLWYSNRWVFGGGTKLTVLGGGGDKTHTCPPCPAPELLGGPSVFLFPPKPKDTLMISRTPEVTCVVVDVSHEDPEVKFNWYVDGVEVHNAKTKPCEEQYGSTYRCVSVLTVLHQDWLNGKEYKCKVSNKALPAPIEKTISKAKGQPREPQVYTLPPSREEMTKNQVSLTCLVKGFYPSDIAVEWESNGQPENNYKTTPPVLDSDGSFFLYSKLTVDKSRWQQGNVFSCSVMHEALHNHYTQKSLSLSPGGGGSGGGGSGGGGSGGGGSGGGGSGGGGSDKTHTCPPCPAPELLGGPSVFLFPPKPKDTLMISRTPEVTCVVVDVSHEDPEVKFNWYVDGVEVHNAKTKPCEEQYGSTYRCVSVLTVLHQDWLNGKEYKCKVSNKALPAPIEKTISKAKGQPREPQVYTLPPSREEMTKNQVSLTCLVKGFYPSDIAVEWESNGQPENNYKTTPPVLDSDGSFFLYSKLTVDKSRWQQGNVFSCSVMHEALHNHYTQKSLSLSPGK

SEQ ID NO: 1220 - protein, 984 aa, Artificial Sequence
  Synthetic peptide
EVQLLESGGGLVQPGGSLRLSCAASGFTFSTYAMSWVRQAPGKCLEWVSLISGSGGRTYYAESVKGRFTISRDNSKNTLYLQMNSLRAEDTAVYYCAKHDYSNYPYFDYWGQGTLVTVSSGGGGSGGGGSGGGGSEIVLTQSPGTLSLSPGERATLSCRASQSVRSNYLAWYQQKPGQAPRLLIYGASNRATGIPDRFSGSGSGTDFTLTISRLEPEDFAVYSCQQYGISPPTFGCGTKVEIKSGGGGSEVQLVESGGGLVQPGGSLKLSCAASGFTFNKYAMNWVRQAPGKGLEWVARIRSKYNNYATYYADSVKDRFTISRDDSKNTAYLQMNNLKTEDTAVYYCVRHGNFGNSYISYWAYWGQGTLVTVSSGGGGSGGGGSGGGGSQTVVTQEPSLTVSPGGTVTLTCGSSTGAVTSGNYPNWVQQKPGQAPRGLIGGTKFLAPGTPARFSGSLLGGKAALTLSGVQPEDEAEYYCVLWYSNRWVFGGGTKLTVLGGGGDKTHTCPPCPAPELLGGPSVFLFPPKPKDTLMISRTPEVTCVVVDVSHEDPEVKFNWYVDGVEVHNAKTKPCEEQYGSTYRCVSVLTVLHQDWLNGKEYKCKVSNKALPAPIEKTISKAKGQPREPQVYTLPPSREEMTKNQVSLTCLVKGFYPSDIAVEWESNGQPENNYKTTPPVLDSDGSFFLYSKLTVDKSRWQQGNVFSCSVMHEALHNHYTQKSLSLSPGGGGSGGGGSGGGGSGGGGSGGGGSGGGGSDKTHTCPPCPAPELLGGPSVFLFPPKPKDTLMISRTPEVTCVVVDVSHEDPEVKFNWYVDGVEVHNAKTKPCEEQYGSTYRCVSVLTVLHQDWLNGKEYKCKVSNKALPAPIEKTISKAKGQPREPQVYTLPPSREEMTKNQVSLTCLVKGFYPSDIAVEWESNGQPENNYKTTPPVLDSDGSFFLYSKLTVDKSRWQQGNVFSCSVMHEALHNHYTQKSLSLSPGK

SEQ ID NO: 1221 - protein, 984 aa, Artificial Sequence
  Synthetic peptide
EVQLLESGGGLVQPGGSLRLSCAASGFTFSTYAMSWVRQAPGKGLEWVSLISGSGGRTYYAESVKGRFTISRDNSKNTLYLQMNSLRAEDTAVYYCAKHDYSNYPYFDYWGQGTLVTVSSGGGGSGGGGSGGGGSEIVLTQSPGTLSLSPGERATLSCRASQSVRSNYLAWYQQKPGQAPRLLIYGASNRATGIPDRFSGSGSGTDFTLTISRLEPEDFAVYSCQQYGISPPTFGGGTKVEIKSGGGGSEVQLVESGGGLVQPGGSLKLSCAASGFTFNKYAMNWVRQAPGKGLEWVARIRSKYNNYATYYADSVKDRFTISRDDSKNTAYLQMNNLKTEDTAVYYCVRHGNFGNSYISYWAYWGQGTLVTVSSGGGGSGGGGSGGGGSQTVVTQEPSLTVSPGGTVTLTCGSSTGAVTSGNYPNWVQQKPGQAPRGLIGGTKFLAPGTPARFSGSLLGGKAALTLSGVQPEDEAEYYCVLWYSNRWVFGGGTKLTVLGGGGDKTHTCPPCPAPELLGGPSVFLFPPKPKDTLMISRTPEVTCVVVDVSHEDPEVKFNWYVDGVEVHNAKTKPCEEQYGSTYRCVSVLTVLHQDWLNGKEYKCKVSNKALPAPIEKTISKAKGQPREPQVYTLPPSREEMTKNQVSLTCLVKGFYPSDIAVEWESNGQPENNYKTTPPVLDSDGSFFLYSKLTVDKSRWQQGNVFSCSVMHEALHNHYTQKSLSLSPGGGGSGGGGSGGGGSGGGGSGGGGSGGGGSDKTHTCPPCPAPELLGGPSVFLFPPKPKDTLMISRTPEVTCVVVDVSHEDPEVKFNWYVDGVEVHNAKTKPCEEQYGSTYRCVSVLTVLHQDWLNGKEYKCKVSNKALPAPIEKTISKAKGQPREPQVYTLPPSREEMTKNQVSLTCLVKGFYPSDIAVEWESNGQPENNYKTTPPVLDSDGSFFLYSKLTVDKSRWQQGNVFSCSVMHEALHNHYTQKSLSLSPGK

SEQ ID NO: 1222 - protein, 983 aa, Artificial Sequence
  Synthetic peptide
EVQLLESGGGLVQPGGSLRLSCAASGFTFSSYAMSWVRQSPGKCLEWVSAISGSGGRAQYAESVQGRFTVSRDNSKNTLYLQMNSLRAEDTAVYYCAKHDYSNYPYFDYWGQGTLVTVSSGGGGSGGGGSGGGGSEIVLTQSPATLSVSPGERATLSCRASQSVSSNLAWYQQKPGQAPRLLIYGSSSRATGIPDRFSGSGSGTDFTLTISRLEPEDFAVYYCQQYGSSPPPFGCGTKVEIKSGGGGSEVQLVESGGGLVQPGGSLKLSCAASGFTFNKYAMNWVRQAPGKGLEWVARIRSKYNNYATYYADSVKDRFTISRDDSKNTAYLQMNNLKTEDTAVYYCVRHGNFGNSYISYWAYWGQGTLVTVSSGGGGSGGGGSGGGGSQTVVTQEPSLTVSPGGTVTLTCGSSTGAVTSGNYPNWVQQKPGQAPRGLIGGTKFLAPGTPARFSGSLLGGKAALTLSGVQPEDEAEYYCVLWYSNRWVFGGGTKLTVLGGGGDKTHTCPPCPAPELLGGPSVFLFPPKPKDTLMISRTPEVTCVVVDVSHEDPEVKFNWYVDGVEVHNAKTKPCEEQYGSTYRCVSVLTVLHQDWLNGKEYKCKVSNKALPAPIEKTISKAKGQPREPQVYTLPPSREEMTKNQVSLTCLVKGFYPSDIAVEWESNGQPENNYKTTPPVLDSDGSFFLYSKLTVDKSRWQQGNVFSCSVMHEALHNHYTQKSLSLSPGGGGSGGGGSGGGGSGGGGSGGGGSGGGGSDKTHTCPPCPAPELLGGPSVFLFPPKPKDTLMISRTPEVTCVVVDVSHEDPEVKFNWYVDGVEVHNAKTKPCEEQYGSTYRCVSVLTVLHQDWLNGKEYKCKVSNKALPAPIEKTISKAKGQPREPQVYTLPPSREEMTKNQVSLTCLVKGFYPSDIAVEWESNGQPENNYKTTPPVLDSDGSFFLYSKLTVDKSRWQQGNVFSCSVMHEALHNHYTQKSLSLSPGK

SEQ ID NO: 1223 - protein, 983 aa, Artificial Sequence
  Synthetic peptide
EVQLLESGGGLVQPGGSLRLSCAASGFTFSSYAMSWVRQSPGKGLEWVSAISGSGGRAQYAESVQGRFTVSRDNSKNTLYLQMNSLRAEDTAVYYCAKHDYSNYPYFDYWGQGTLVTVSSGGGGSGGGGSGGGGSEIVLTQSPATLSVSPGERATLSCRASQSVSSNLAWYQQKPGQAPRLLIYGSSSRATGIPDRFSGSGSGTDFTLTISRLEPEDFAVYYCQQYGSSPPPFGGGTKVEIKSGGGGSEVQLVESGGGLVQPGGSLKLSCAASGFTFNKYAMNWVRQAPGKGLEWVARIRSKYNNYATYYADSVKDRFTISRDDSKNTAYLQMNNLKTEDTAVYYCVRHGNFGNSYISYWAYWGQGTLVTVSSGGGGSGGGGSGGGGSQTVVTQEPSLTVSPGGTVTLTCGSSTGAVTSGNYPNWVQQKPGQAPRGLIGGTKFLAPGTPARFSGSLLGGKAALTLSGVQPEDEAEYYCVLWYSNRWVFGGGTKLTVLGGGGDKTHTCPPCPAPELLGGPSVFLFPPKPKDTLMISRTPEVTCVVVDVSHEDPEVKFNWYVDGVEVHNAKTKPCEEQYGSTYRCVSVLTVLHQDWLNGKEYKCKVSNKALPAPIEKTISKAKGQPREPQVYTLPPSREEMTKNQVSLTCLVKGFYPSDIAVEWESNGQPENNYKTTPPVLDSDGSFFLYSKLTVDKSRWQQGNVFSCSVMHEALHNHYTQKSLSLSPGGGGSGGGGSGGGGSGGGGSGGGGSGGGGSDKTHTCPPCPAPELLGGPSVFLFPPKPKDTLMISRTPEVTCVVVDVSHEDPEVKFNWYVDGVEVHNAKTKPCEEQYGSTYRCVSVLTVLHQDWLNGKEYKCKVSNKALPAPIEKTISKAKGQPREPQVYTLPPSREEMTKNQVSLTCLVKGFYPSDIAVEWESNGQPENNYKTTPPVLDSDGSFFLYSKLTVDKSRWQQGNVFSCSVMHEALHNHYTQKSLSLSPGK

SEQ ID NO: 1224 - protein, 984 aa, Artificial Sequence
  Synthetic peptide
EVQLLESGGGMVQPGGSLRLSCAASGFTFSSYAMSWVRQAPGKCLEWVSAISGSGGRTFYAESVEGRFTISRDNSKNTLYLQMNSLRAEDTAVYYCTKHDYSNYPYFDYWGQGTLVTVSSGGGGSGGGGSGGGGSEIVLTQSPGTLSLSPGERATLSCRASQGVRSDYLAWYQQKPGQAPRLLIYGASSRATGIPDRFSGSGSGTDFTLTISRLEPEDFAVYHCQQYGSTPPTFGCGTKVEIKSGGGGSEVQLVESGGGLVQPGGSLKLSCAASGFTFNKYAMNWVRQAPGKGLEWVARIRSKYNNYATYYADSVKDRFTISRDDSKNTAYLQMNNLKTEDTAVYYCVRHGNFGNSYISYWAYWGQGTLVTVSSGGGGSGGGGSGGGGSQTVVTQEPSLTVSPGGTVTLTCGSSTGAVTSGNYPNWVQQKPGQAPRGLIGGTKFLAPGTPARFSGSLLGGKAALTLSGVQPEDEAEYYCVLWYSNRWVFGGGTKLTVLGGGGDKTHTCPPCPAPELLGGPSVFLFPPKPKDTLMISRTPEVTCVVVDVSHEDPEVKFNWYVDGVEVHNAKTKPCEEQYGSTYRCVSVLTVLHQDWLNGKEYKCKVSNKALPAPIEKTISKAKGQPREPQVYTLPPSREEMTKNQVSLTCLVKGFYPSDIAVEWESNGQPENNYKTTPPVLDSDGSFFLYSKLTVDKSRWQQGNVFSCSVMHEALHNHYTQKSLSLSPGGGGSGGGGSGGGGSGGGGSGGGGSGGGGSDKTHTCPPCPAPELLGGPSVFLFPPKPKDTLMISRTPEVTCVVVDVSHEDPEVKFNWYVDGVEVHNAKTKPCEEQYGSTYRCVSVLTVLHQDWLNGKEYKCKVSNKALPAPIEKTISKAKGQPREPQVYTLPPSREEMTKNQVSLTCLVKGFYPSDIAVEWESNGQPENNYKTTPPVLDSDGSFFLYSKLTVDKSRWQQGNVFSCSVMHEALHNHYTQKSLSLSPGK

SEQ ID NO: 1225 - protein, 984 aa, Artificial Sequence
  Synthetic peptide
EVQLLESGGGMVQPGGSLRLSCAASGFTFSSYAMSWVRQAPGKGLEWVSAISGSGGRTFYAESVEGRFTISRDNSKNTLYLQMNSLRAEDTAVYYCTKHDYSNYPYFDYWGQGTLVTVSSGGGGSGGGGSGGGGSEIVLTQSPGTLSLSPGERATLSCRASQGVRSDYLAWYQQKPGQAPRLLIYGASSRATGIPDRFSGSGSGTDFTLTISRLEPEDFAVYHCQQYGSTPPTFGGGTKVEIKSGGGGSEVQLVESGGGLVQPGGSLKLSCAASGFTFNKYAMNWVRQAPGKGLEWVARIRSKYNNYATYYADSVKDRFTISRDDSKNTAYLQMNNLKTEDTAVYYCVRHGNFGNSYISYWAYWGQGTLVTVSSGGGGSGGGGSGGGGSQTVVTQEPSLTVSPGGTVTLTCGSSTGAVTSGNYPNWVQQKPGQAPRGLIGGTKFLAPGTPARFSGSLLGGKAALTLSGVQPEDEAEYYCVLWYSNRWVFGGGTKLTVLGGGGDKTHTCPPCPAPELLGGPSVFLFPPKPKDTLMISRTPEVTCVVVDVSHEDPEVKFNWYVDGVEVHNAKTKPCEEQYGSTYRCVSVLTVLHQDWLNGKEYKCKVSNKALPAPIEKTISKAKGQPREPQVYTLPPSREEMTKNQVSLTCLVKGFYPSDIAVEWESNGQPENNYKTTPPVLDSDGSFFLYSKLTVDKSRWQQGNVFSCSVMHEALHNHYTQKSLSLSPGGGGSGGGGSGGGGSGGGGSGGGGSGGGGSDKTHTCPPCPAPELLGGPSVFLFPPKPKDTLMISRTPEVTCVVVDVSHEDPEVKFNWYVDGVEVHNAKTKPCEEQYGSTYRCVSVLTVLHQDWLNGKEYKCKVSNKALPAPIEKTISKAKGQPREPQVYTLPPSREEMTKNQVSLTCLVKGFYPSDIAVEWESNGQPENNYKTTPPVLDSDGSFFLYSKLTVDKSRWQQGNVFSCSVMHEALHNHYTQKSLSLSPGK

SEQ ID NO: 1226 - protein, 984 aa, Artificial Sequence
  Synthetic peptide
EVQLLESGGGLVQPGGSLRLSCAASGFTFSSYAMSWVRQAPGKCLEWVSAIGEGGGYTYYAESVKGRFTISRDNSKNTLSLLMNSLRAEDTAVYYCARHDYSNYPYFDYWGQGTLVTVSSGGGGSGGGGSGGGGSEIVLTQSPGTLSLSPGERATLSCRASQGVRSSYFAWYQQKPGQAPRLLIYGASTRATGIPARFSGSGSGTDFTLTISRLEPEDFAVYYCQQYGSSPPTFGCGTKVEIKSGGGGSEVQLVESGGGLVQPGGSLKLSCAASGFTFNKYAMNWVRQAPGKGLEWVARIRSKYNNYATYYADSVKDRFTISRDDSKNTAYLQMNNLKTEDTAVYYCVRHGNFGNSYISYWAYWGQGTLVTVSSGGGGSGGGGSGGGGSQTVVTQEPSLTVSPGGTVTLTCGSSTGAVTSGNYPNWVQQKPGQAPRGLIGGTKFLAPGTPARFSGSLLGGKAALTLSGVQPEDEAEYYCVLWYSNRWVFGGGTKLTVLGGGGDKTHTCPPCPAPELLGGPSVFLFPPKPKDTLMISRTPEVTCVVVDVSHEDPEVKFNWYVDGVEVHNAKTKPCEEQYGSTYRCVSVLTVLHQDWLNGKEYKCKVSNKALPAPIEKTISKAKGQPREPQVYTLPPSREEMTKNQVSLTCLVKGFYPSDIAVEWESNGQPENNYKTTPPVLDSDGSFFLYSKLTVDKSRWQQGNVFSCSVMHEALHNHYTQKSLSLSPGGGGSGGGGSGGGGSGGGGSGGGGSGGGGSDKTHTCPPCPAPELLGGPSVFLFPPKPKDTLMISRTPEVTCVVVDVSHEDPEVKFNWYVDGVEVHNAKTKPCEEQYGSTYRCVSVLTVLHQDWLNGKEYKCKVSNKALPAPIEKTISKAKGQPREPQVYTLPPSREEMTKNQVSLTCLVKGFYPSDIAVEWESNGQPENNYKTTPPVLDSDGSFFLYSKLTVDKSRWQQGNVFSCSVMHEALHNHYTQKSLSLSPGK

SEQ ID NO: 1227 - protein, 984 aa, Artificial Sequence
  Synthetic peptide
EVQLLESGGGLVQPGGSLRLSCAASGFTFSSYAMSWVRQAPGKGLEWVSAIGEGGGYTYYAESVKGRFTISRDNSKNTLSLLMNSLRAEDTAVYYCARHDYSNYPYFDYWGQGTLVTVSSGGGGSGGGGSGGGGSEIVLTQSPGTLSLSPGERATLSCRASQGVRSSYFAWYQQKPGQAPRLLIYGASTRATGIPARFSGSGSGTDFTLTISRLEPEDFAVYYCQQYGSSPPTFGQGTKVEIKSGGGGSEVQLVESGGGLVQPGGSLKLSCAASGFTFNKYAMNWVRQAPGKGLEWVARIRSKYNNYATYYADSVKDRFTISRDDSKNTAYLQMNNLKTEDTAVYYCVRHGNFGNSYISYWAYWGQGTLVTVSSGGGGSGGGGSGGGGSQTVVTQEPSLTVSPGGTVTLTCGSSTGAVTSGNYPNWVQQKPGQAPRGLIGGTKFLAPGTPARFSGSLLGGKAALTLSGVQPEDEAEYYCVLWYSNRWVFGGGTKLTVLGGGGDKTHTCPPCPAPELLGGPSVFLFPPKPKDTLMISRTPEVTCVVVDVSHEDPEVKFNWYVDGVEVHNAKTKPCEEQYGSTYRCVSVLTVLHQDWLNGKEYKCKVSNKALPAPIEKTISKAKGQPREPQVYTLPPSREEMTKNQVSLTCLVKGFYPSDIAVEWESNGQPENNYKTTPPVLDSDGSFFLYSKLTVDKSRWQQGNVFSCSVMHEALHNHYTQKSLSLSPGGGGSGGGGSGGGGSGGGGSGGGGSGGGGSDKTHTCPPCPAPELLGGPSVFLFPPKPKDTLMISRTPEVTCVVVDVSHEDPEVKFNWYVDGVEVHNAKTKPCEEQYGSTYRCVSVLTVLHQDWLNGKEYKCKVSNKALPAPIEKTISKAKGQPREPQVYTLPPSREEMTKNQVSLTCLVKGFYPSDIAVEWESNGQPENNYKTTPPVLDSDGSFFLYSKLTVDKSRWQQGNVFSCSVMHEALHNHYTQKSLSLSPGK

SEQ ID NO: 1228 - protein, 984 aa, Artificial Sequence
  Synthetic peptide
EVQLLESGGGVVQPGRSLRLSCAASGFTFSSYAMSWVRQAPGKCLEWVSAISGSGGRTFYAESVEGRFTISRDNSKNTLYLQMNSLRAEDTAVYYCAKHDYSNYPYFDYWGQGTLVTVSSGGGGSGGGGSGGGGSEIVLTQSPGTLSLSPGERATLSCRASQSIRSNYLAWYQQKPGQAPRLLIYGASSRATGIPDRFSGSGSGTDFTLTISRLEPEDFAVYYCQQYGSSPPSFGCGTKVEIKSGGGGSEVQLVESGGGLVQPGGSLKLSCAASGFTFNKYAMNWVRQAPGKGLEWVARIRSKYNNYATYYADSVKDRFTISRDDSKNTAYLQMNNLKTEDTAVYYCVRHGNFGNSYISYWAYWGQGTLVTVSSGGGGSGGGGSGGGGSQTVVTQEPSLTVSPGGTVTLTCGSSTGAVTSGNYPNWVQQKPGQAPRGLIGGTKFLAPGTPARFSGSLLGGKAALTLSGVQPEDEAEYYCVLWYSNRWVFGGGTKLTVLGGGGDKTHTCPPCPAPELLGGPSVFLFPPKPKDTLMISRTPEVTCVVVDVSHEDPEVKFNWYVDGVEVHNAKTKPCEEQYGSTYRCVSVLTVLHQDWLNGKEYKCKVSNKALPAPIEKTISKAKGQPREPQVYTLPPSREEMTKNQVSLTCLVKGFYPSDIAVEWESNGQPENNYKTTPPVLDSDGSFFLYSKLTVDKSRWQQGNVFSCSVMHEALHNHYTQKSLSLSPGGGGSGGGGSGGGGSGGGGSGGGGSGGGGSDKTHTCPPCPAPELLGGPSVFLFPPKPKDTLMISRTPEVTCVVVDVSHEDPEVKFNWYVDGVEVHNAKTKPCEEQYGSTYRCVSVLTVLHQDWLNGKEYKCKVSNKALPAPIEKTISKAKGQPREPQVYTLPPSREEMTKNQVSLTCLVKGFYPSDIAVEWESNGQPENNYKTTPPVLDSDGSFFLYSKLTVDKSRWQQGNVFSCSVMHEALHNHYTQKSLSLSPGK

SEQ ID NO: 1229 - protein, 984 aa, Artificial Sequence
  Synthetic peptide
EVQLLESGGGVVQPGRSLRLSCAASGFTFSSYAMSWVRQAPGKGLEWVSAISGSGGRTFYAESVEGRFTISRDNSKNTLYLQMNSLRAEDTAVYYCAKHDYSNYPYFDYWGQGTLVTVSSGGGGSGGGGSGGGGSEIVLTQSPGTLSLSPGERATLSCRASQSIRSNYLAWYQQKPGQAPRLLIYGASSRATGIPDRFSGSGSGTDFTLTISRLEPEDFAVYYCQQYGSSPPSFGQGTKVEIKSGGGGSEVQLVESGGGLVQPGGSLKLSCAASGFTFNKYAMNWVRQAPGKGLEWVARIRSKYNNYATYYADSVKDRFTISRDDSKNTAYLQMNNLKTEDTAVYYCVRHGNFGNSYISYWAYWGQGTLVTVSSGGGGSGGGGSGGGGSQTVVTQEPSLTVSPGGTVTLTCGSSTGAVTSGNYPNWVQQKPGQAPRGLIGGTKFLAPGTPARFSGSLLGGKAALTLSGVQPEDEAEYYCVLWYSNRWVFGGGTKLTVLGGGGDKTHTCPPCPAPELLGGPSVFLFPPKPKDTLMISRTPEVTCVVVDVSHEDPEVKFNWYVDGVEVHNAKTKPCEEQYGSTYRCVSVLTVLHQDWLNGKEYKCKVSNKALPAPIEKTISKAKGQPREPQVYTLPPSREEMTKNQVSLTCLVKGFYPSDIAVEWESNGQPENNYKTTPPVLDSDGSFFLYSKLTVDKSRWQQGNVFSCSVMHEALHNHYTQKSLSLSPGGGGSGGGGSGGGGSGGGGSGGGGSGGGGSDKTHTCPPCPAPELLGGPSVFLFPPKPKDTLMISRTPEVTCVVVDVSHEDPEVKFNWYVDGVEVHNAKTKPCEEQYGSTYRCVSVLTVLHQDWLNGKEYKCKVSNKALPAPIEKTISKAKGQPREPQVYTLPPSREEMTKNQVSLTCLVKGFYPSDIAVEWESNGQPENNYKTTPPVLDSDGSFFLYSKLTVDKSRWQQGNVFSCSVMHEALHNHYTQKSLSLSPGK

SEQ ID NO: 1230 - protein, 984 aa, Artificial Sequence
  Synthetic peptide
EVQLLESGGGVVQPGRSLRLSCAASGFTFSSYAMSWVRQAPGKCLEWVSAISGSGGGTFYAESVEGRFTISRDNSKNTLYLQMNSLRAEDTAVYYCARHDYSNYPYFDYWGLGTLVTVSSGGGGSGGGGSGGGGSEIVLTQSPGTLSLSPGERATLSCRASQSVRSSYLAWYQQKPGQAPRLLIYGASSRATGIPDRFSGSGSGTDFTLTISRLEPEDFAVYSCQQYGDLPFTFGCGTKVEIKSGGGGSEVQLVESGGGLVQPGGSLKLSCAASGFTFNKYAMNWVRQAPGKGLEWVARIRSKYNNYATYYADSVKDRFTISRDDSKNTAYLQMNNLKTEDTAVYYCVRHGNFGNSYISYWAYWGQGTLVTVSSGGGGSGGGGSGGGGSQTVVTQEPSLTVSPGGTVTLTCGSSTGAVTSGNYPNWVQQKPGQAPRGLIGGTKFLAPGTPARFSGSLLGGKAALTLSGVQPEDEAEYYCVLWYSNRWVFGGGTKLTVLGGGGDKTHTCPPCPAPELLGGPSVFLFPPKPKDTLMISRTPEVTCVVVDVSHEDPEVKFNWYVDGVEVHNAKTKPCEEQYGSTYRCVSVLTVLHQDWLNGKEYKCKVSNKALPAPIEKTISKAKGQPREPQVYTLPPSREEMTKNQVSLTCLVKGFYPSDIAVEWESNGQPENNYKTTPPVLDSDGSFFLYSKLTVDKSRWQQGNVFSCSVMHEALHNHYTQKSLSLSPGGGGSGGGGSGGGGSGGGGSGGGGSGGGGSDKTHTCPPCPAPELLGGPSVFLFPPKPKDTLMISRTPEVTCVVVDVSHEDPEVKFNWYVDGVEVHNAKTKPCEEQYGSTYRCVSVLTVLHQDWLNGKEYKCKVSNKALPAPIEKTISKAKGQPREPQVYTLPPSREEMTKNQVSLTCLVKGFYPSDIAVEWESNGQPENNYKTTPPVLDSDGSFFLYSKLTVDKSRWQQGNVFSCSVMHEALHNHYTQKSLSLSPGK

SEQ ID NO: 1231 - protein, 984 aa, Artificial Sequence
  Synthetic peptide
EVQLLESGGGVVQPGRSLRLSCAASGFTFSSYAMSWVRQAPGKGLEWVSAISGSGGGTFYAESVEGRFTISRDNSKNTLYLQMNSLRAEDTAVYYCARHDYSNYPYFDYWGLGTLVTVSSGGGGSGGGGSGGGGSEIVLTQSPGTLSLSPGERATLSCRASQSVRSSYLAWYQQKPGQAPRLLIYGASSRATGIPDRFSGSGSGTDFTLTISRLEPEDFAVYSCQQYGDLPFTFGPGTKVEIKSGGGGSEVQLVESGGGLVQPGGSLKLSCAASGFTFNKYAMNWVRQAPGKGLEWVARIRSKYNNYATYYADSVKDRFTISRDDSKNTAYLQMNNLKTEDTAVYYCVRHGNFGNSYISYWAYWGQGTLVTVSSGGGGSGGGGSGGGGSQTVVTQEPSLTVSPGGTVTLTCGSSTGAVTSGNYPNWVQQKPGQAPRGLIGGTKFLAPGTPARFSGSLLGGKAALTLSGVQPEDEAEYYCVLWYSNRWVFGGGTKLTVLGGGGDKTHTCPPCPAPELLGGPSVFLFPPKPKDTLMISRTPEVTCVVVDVSHEDPEVKFNWYVDGVEVHNAKTKPCEEQYGSTYRCVSVLTVLHQDWLNGKEYKCKVSNKALPAPIEKTISKAKGQPREPQVYTLPPSREEMTKNQVSLTCLVKGFYPSDIAVEWESNGQPENNYKTTPPVLDSDGSFFLYSKLTVDKSRWQQGNVFSCSVMHEALHNHYTQKSLSLSPGGGGSGGGGSGGGGSGGGGSGGGGSGGGGSDKTHTCPPCPAPELLGGPSVFLFPPKPKDTLMISRTPEVTCVVVDVSHEDPEVKFNWYVDGVEVHNAKTKPCEEQYGSTYRCVSVLTVLHQDWLNGKEYKCKVSNKALPAPIEKTISKAKGQPREPQVYTLPPSREEMTKNQVSLTCLVKGFYPSDIAVEWESNGQPENNYKTTPPVLDSDGSFFLYSKLTVDKSRWQQGNVFSCSVMHEALHNHYTQKSLSLSPGK

SEQ ID NO: 1232 - protein, 984 aa, Artificial Sequence
  Synthetic peptide
EVQLLESGGGMVQPGGSLRLSCAASGFTFSSYAMSWVRQAPGKCLEWVSAISGSGGRTFYAESVEGRFTISRDNSKNTLYLQMNSLRAEDTAVYYCTKHDYSNYPYFDYWGQGTLVTVSSGGGGSGGGGSGGGGSEIVLTQSPGTLSLSPGERATLSCRASQSVRSSYLAWYQQKPGQAPRLLIYGASSRATGIPDRFSGSGSGTDFTLTISRLEPEDFAVYYCQQYGDLPFTFGCGTKVDIKSGGGGSEVQLVESGGGLVQPGGSLKLSCAASGFTFNKYAMNWVRQAPGKGLEWVARIRSKYNNYATYYADSVKDRFTISRDDSKNTAYLQMNNLKTEDTAVYYCVRHGNFGNSYISYWAYWGQGTLVTVSSGGGGSGGGGSGGGGSQTVVTQEPSLTVSPGGTVTLTCGSSTGAVTSGNYPNWVQQKPGQAPRGLIGGTKFLAPGTPARFSGSLLGGKAALTLSGVQPEDEAEYYCVLWYSNRWVFGGGTKLTVLGGGGDKTHTCPPCPAPELLGGPSVFLFPPKPKDTLMISRTPEVTCVVVDVSHEDPEVKFNWYVDGVEVHNAKTKPCEEQYGSTYRCVSVLTVLHQDWLNGKEYKCKVSNKALPAPIEKTISKAKGQPREPQVYTLPPSREEMTKNQVSLTCLVKGFYPSDIAVEWESNGQPENNYKTTPPVLDSDGSFFLYSKLTVDKSRWQQGNVFSCSVMHEALHNHYTQKSLSLSPGGGGSGGGGSGGGGSGGGGSGGGGSGGGGSDKTHTCPPCPAPELLGGPSVFLFPPKPKDTLMISRTPEVTCVVVDVSHEDPEVKFNWYVDGVEVHNAKTKPCEEQYGSTYRCVSVLTVLHQDWLNGKEYKCKVSNKALPAPIEKTISKAKGQPREPQVYTLPPSREEMTKNQVSLTCLVKGFYPSDIAVEWESNGQPENNYKTTPPVLDSDGSFFLYSKLTVDKSRWQQGNVFSCSVMHEALHNHYTQKSLSLSPGK

SEQ ID NO: 1233 - protein, 984 aa, Artificial Sequence
  Synthetic peptide
EVQLLESGGGMVQPGGSLRLSCAASGFTFSSYAMSWVRQAPGKGLEWVSAISGSGGRTFYAESVEGRFTISRDNSKNTLYLQMNSLRAEDTAVYYCTKHDYSNYPYFDYWGQGTLVTVSSGGGGSGGGGSGGGGSEIVLTQSPGTLSLSPGERATLSCRASQSVRSSYLAWYQQKPGQAPRLLIYGASSRATGIPDRFSGSGSGTDFTLTISRLEPEDFAVYYCQQYGDLPFTFGPGTKVDIKSGGGGSEVQLVESGGGLVQPGGSLKLSCAASGFTFNKYAMNWVRQAPGKGLEWVARIRSKYNNYATYYADSVKDRFTISRDDSKNTAYLQMNNLKTEDTAVYYCVRHGNFGNSYISYWAYWGQGTLVTVSSGGGGSGGGGSGGGGSQTVVTQEPSLTVSPGGTVTLTCGSSTGAVTSGNYPNWVQQKPGQAPRGLIGGTKFLAPGTPARFSGSLLGGKAALTLSGVQPEDEAEYYCVLWYSNRWVFGGGTKLTVLGGGGDKTHTCPPCPAPELLGGPSVFLFPPKPKDTLMISRTPEVTCVVVDVSHEDPEVKFNWYVDGVEVHNAKTKPCEEQYGSTYRCVSVLTVLHQDWLNGKEYKCKVSNKALPAPIEKTISKAKGQPREPQVYTLPPSREEMTKNQVSLTCLVKGFYPSDIAVEWESNGQPENNYKTTPPVLDSDGSFFLYSKLTVDKSRWQQGNVFSCSVMHEALHNHYTQKSLSLSPGGGGSGGGGSGGGGSGGGGSGGGGSGGGGSDKTHTCPPCPAPELLGGPSVFLFPPKPKDTLMISRTPEVTCVVVDVSHEDPEVKFNWYVDGVEVHNAKTKPCEEQYGSTYRCVSVLTVLHQDWLNGKEYKCKVSNKALPAPIEKTISKAKGQPREPQVYTLPPSREEMTKNQVSLTCLVKGFYPSDIAVEWESNGQPENNYKTTPPVLDSDGSFFLYSKLTVDKSRWQQGNVFSCSVMHEALHNHYTQKSLSLSPGK

SEQ ID NO: 1234 - protein, 984 aa, Artificial Sequence
  Synthetic peptide
EVQLLESGGGLVQPGGSLRLSCAASGFTFSTYAMSWVRQAPGKCLEWVSLISGSGGRTYYAESVKGRFTISRDNSKNTLYLQMNSLRAEDTAVYYCAKHDYSNYPYFDYWGQGTLVTVSSGGGGSGGGGSGGGGSEIVLTQSPGTLSLSPGERATLSCRASQGVRSSYLAWYQQKPGQAPRLLIYGASSRATGIPDRFSGSGSGTDFTLTINRLEPEDFAVYYCQQYGSSPPTFGCGTKVDIKSGGGGSEVQLVESGGGLVQPGGSLKLSCAASGFTFNKYAMNWVRQAPGKGLEWVARIRSKYNNYATYYADSVKDRFTISRDDSKNTAYLQMNNLKTEDTAVYYCVRHGNFGNSYISYWAYWGQGTLVTVSSGGGGSGGGGSGGGGSQTVVTQEPSLTVSPGGTVTLTCGSSTGAVTSGNYPNWVQQKPGQAPRGLIGGTKFLAPGTPARFSGSLLGGKAALTLSGVQPEDEAEYYCVLWYSNRWVFGGGTKLTVLGGGGDKTHTCPPCPAPELLGGPSVFLFPPKPKDTLMISRTPEVTCVVVDVSHEDPEVKFNWYVDGVEVHNAKTKPCEEQYGSTYRCVSVLTVLHQDWLNGKEYKCKVSNKALPAPIEKTISKAKGQPREPQVYTLPPSREEMTKNQVSLTCLVKGFYPSDIAVEWESNGQPENNYKTTPPVLDSDGSFFLYSKLTVDKSRWQQGNVFSCSVMHEALHNHYTQKSLSLSPGGGGSGGGGSGGGGSGGGGSGGGGSGGGGSDKTHTCPPCPAPELLGGPSVFLFPPKPKDTLMISRTPEVTCVVVDVSHEDPEVKFNWYVDGVEVHNAKTKPCEEQYGSTYRCVSVLTVLHQDWLNGKEYKCKVSNKALPAPIEKTISKAKGQPREPQVYTLPPSREEMTKNQVSLTCLVKGFYPSDIAVEWESNGQPENNYKTTPPVLDSDGSFFLYSKLTVDKSRWQQGNVFSCSVMHEALHNHYTQKSLSLSPGK

SEQ ID NO: 1235 - protein, 984 aa, Artificial Sequence
  Synthetic peptide
EVQLLESGGGLVQPGGSLRLSCAASGFTFSTYAMSWVRQAPGKGLEWVSLISGSGGRTYYAESVKGRFTISRDNSKNTLYLQMNSLRAEDTAVYYCAKHDYSNYPYFDYWGQGTLVTVSSGGGGSGGGGSGGGGSEIVLTQSPGTLSLSPGERATLSCRASQGVRSSYLAWYQQKPGQAPRLLIYGASSRATGIPDRFSGSGSGTDFTLTINRLEPEDFAVYYCQQYGSSPPTFGGGTKVDIKSGGGGSEVQLVESGGGLVQPGGSLKLSCAASGFTFNKYAMNWVRQAPGKGLEWVARIRSKYNNYATYYADSVKDRFTISRDDSKNTAYLQMNNLKTEDTAVYYCVRHGNFGNSYISYWAYWGQGTLVTVSSGGGGSGGGGSGGGGSQTVVTQEPSLTVSPGGTVTLTCGSSTGAVTSGNYPNWVQQKPGQAPRGLIGGTKFLAPGTPARFSGSLLGGKAALTLSGVQPEDEAEYYCVLWYSNRWVFGGGTKLTVLGGGGDKTHTCPPCPAPELLGGPSVFLFPPKPKDTLMISRTPEVTCVVVDVSHEDPEVKFNWYVDGVEVHNAKTKPCEEQYGSTYRCVSVLTVLHQDWLNGKEYKCKVSNKALPAPIEKTISKAKGQPREPQVYTLPPSREEMTKNQVSLTCLVKGFYPSDIAVEWESNGQPENNYKTTPPVLDSDGSFFLYSKLTVDKSRWQQGNVFSCSVMHEALHNHYTQKSLSLSPGGGGSGGGGSGGGGSGGGGSGGGGSGGGGSDKTHTCPPCPAPELLGGPSVFLFPPKPKDTLMISRTPEVTCVVVDVSHEDPEVKFNWYVDGVEVHNAKTKPCEEQYGSTYRCVSVLTVLHQDWLNGKEYKCKVSNKALPAPIEKTISKAKGQPREPQVYTLPPSREEMTKNQVSLTCLVKGFYPSDIAVEWESNGQPENNYKTTPPVLDSDGSFFLYSKLTVDKSRWQQGNVFSCSVMHEALHNHYTQKSLSLSPGK

SEQ ID NO: 1236 - protein, 984 aa, Artificial Sequence
  Synthetic peptide
EVQLLESGGGVVQPGRSLRLSCAASGFTFSSYAMSWVRQAPGKCLEWVSAISGSGGRTFYAESVEGRFTISRDNSKNTLYLQMNSLRAEDTAVYYCAKHDYSNYPYFDYWGQGTLVTVSSGGGGSGGGGSGGGGSEIVLTQSPGTLSLSPGERATLSCRASQSVRSNYLAWYQQKPGQAPRLLIYGASSRATGIPDRFSGSGSGTDFTLTINRLEPEDFAVYYCQQYGSSPPTFGCGTKVDIKSGGGGSEVQLVESGGGLVQPGGSLKLSCAASGFTFNKYAMNWVRQAPGKGLEWVARIRSKYNNYATYYADSVKDRFTISRDDSKNTAYLQMNNLKTEDTAVYYCVRHGNFGNSYISYWAYWGQGTLVTVSSGGGGSGGGGSGGGGSQTVVTQEPSLTVSPGGTVTLTCGSSTGAVTSGNYPNWVQQKPGQAPRGLIGGTKFLAPGTPARFSGSLLGGKAALTLSGVQPEDEAEYYCVLWYSNRWVFGGGTKLTVLGGGGDKTHTCPPCPAPELLGGPSVFLFPPKPKDTLMISRTPEVTCVVVDVSHEDPEVKFNWYVDGVEVHNAKTKPCEEQYGSTYRCVSVLTVLHQDWLNGKEYKCKVSNKALPAPIEKTISKAKGQPREPQVYTLPPSREEMTKNQVSLTCLVKGFYPSDIAVEWESNGQPENNYKTTPPVLDSDGSFFLYSKLTVDKSRWQQGNVFSCSVMHEALHNHYTQKSLSLSPGGGGSGGGGSGGGGSGGGGSGGGGSGGGGSDKTHTCPPCPAPELLGGPSVFLFPPKPKDTLMISRTPEVTCVVVDVSHEDPEVKFNWYVDGVEVHNAKTKPCEEQYGSTYRCVSVLTVLHQDWLNGKEYKCKVSNKALPAPIEKTISKAKGQPREPQVYTLPPSREEMTKNQVSLTCLVKGFYPSDIAVEWESNGQPENNYKTTPPVLDSDGSFFLYSKLTVDKSRWQQGNVFSCSVMHEALHNHYTQKSLSLSPGK

SEQ ID NO: 1237 - protein, 984 aa, Artificial Sequence
  Synthetic peptide
EVQLLESGGGVVQPGRSLRLSCAASGFTFSSYAMSWVRQAPGKGLEWVSAISGSGGRTFYAESVEGRFTISRDNSKNTLYLQMNSLRAEDTAVYYCAKHDYSNYPYFDYWGQGTLVTVSSGGGGSGGGGSGGGGSEIVLTQSPGTLSLSPGERATLSCRASQSVRSNYLAWYQQKPGQAPRLLIYGASSRATGIPDRFSGSGSGTDFTLTINRLEPEDFAVYYCQQYGSSPPTFGGGTKVDIKSGGGGSEVQLVESGGGLVQPGGSLKLSCAASGFTFNKYAMNWVRQAPGKGLEWVARIRSKYNNYATYYADSVKDRFTISRDDSKNTAYLQMNNLKTEDTAVYYCVRHGNFGNSYISYWAYWGQGTLVTVSSGGGGSGGGGSGGGGSQTVVTQEPSLTVSPGGTVTLTCGSSTGAVTSGNYPNWVQQKPGQAPRGLIGGTKFLAPGTPARFSGSLLGGKAALTLSGVQPEDEAEYYCVLWYSNRWVFGGGTKLTVLGGGGDKTHTCPPCPAPELLGGPSVFLFPPKPKDTLMISRTPEVTCVVVDVSHEDPEVKFNWYVDGVEVHNAKTKPCEEQYGSTYRCVSVLTVLHQDWLNGKEYKCKVSNKALPAPIEKTISKAKGQPREPQVYTLPPSREEMTKNQVSLTCLVKGFYPSDIAVEWESNGQPENNYKTTPPVLDSDGSFFLYSKLTVDKSRWQQGNVFSCSVMHEALHNHYTQKSLSLSPGGGGSGGGGSGGGGSGGGGSGGGGSGGGGSDKTHTCPPCPAPELLGGPSVFLFPPKPKDTLMISRTPEVTCVVVDVSHEDPEVKFNWYVDGVEVHNAKTKPCEEQYGSTYRCVSVLTVLHQDWLNGKEYKCKVSNKALPAPIEKTISKAKGQPREPQVYTLPPSREEMTKNQVSLTCLVKGFYPSDIAVEWESNGQPENNYKTTPPVLDSDGSFFLYSKLTVDKSRWQQGNVFSCSVMHEALHNHYTQKSLSLSPGK

SEQ ID NO: 1238 - protein, 983 aa, Artificial Sequence
  Synthetic peptide
EVQLLESGGGLVQPGGSLRLSCAASGFTFSSYAMSWVRQAPGKCLEWVSVISGSGGITDFAESVKGRFTISRDNSRNTLYLQMNSLRAEDTAVYFCARHDYSNYFFFDYWGQGTLVTVSSGGGGSGGGGSGGGGSDIQMTQSPSSLSASVGDRVTITCRASQGISNYLAWYQQKPGKVPKLLIYAASILQSGVPSKFSGSGSGTDFTLTISSLQPEDFAIYYCQQYFAYPITFGCGTRLEIKSGGGGSEVQLVESGGGLVQPGGSLKLSCAASGFTFNKYAMNWVRQAPGKGLEWVARIRSKYNNYATYYADSVKDRFTISRDDSKNTAYLQMNNLKTEDTAVYYCVRHGNFGNSYISYWAYWGQGTLVTVSSGGGGSGGGGSGGGGSQTVVTQEPSLTVSPGGTVTLTCGSSTGAVTSGNYPNWVQQKPGQAPRGLIGGTKFLAPGTPARFSGSLLGGKAALTLSGVQPEDEAEYYCVLWYSNRWVFGGGTKLTVLGGGGDKTHTCPPCPAPELLGGPSVFLFPPKPKDTLMISRTPEVTCVVVDVSHEDPEVKFNWYVDGVEVHNAKTKPCEEQYGSTYRCVSVLTVLHQDWLNGKEYKCKVSNKALPAPIEKTISKAKGQPREPQVYTLPPSREEMTKNQVSLTCLVKGFYPSDIAVEWESNGQPENNYKTTPPVLDSDGSFFLYSKLTVDKSRWQQGNVFSCSVMHEALHNHYTQKSLSLSPGGGGSGGGGSGGGGSGGGGSGGGGSGGGGSDKTHTCPPCPAPELLGGPSVFLFPPKPKDTLMISRTPEVTCVVVDVSHEDPEVKFNWYVDGVEVHNAKTKPCEEQYGSTYRCVSVLTVLHQDWLNGKEYKCKVSNKALPAPIEKTISKAKGQPREPQVYTLPPSREEMTKNQVSLTCLVKGFYPSDIAVEWESNGQPENNYKTTPPVLDSDGSFFLYSKLTVDKSRWQQGNVFSCSVMHEALHNHYTQKSLSLSPGK

SEQ ID NO: 1239 - protein, 983 aa, Artificial Sequence
  Synthetic peptide
EVQLLESGGGLVQPGGSLRLSCAASGFTFSSYAMSWVRQAPGKGLEWVSVISGSGGITDFAESVKGRFTISRDNSRNTLYLQMNSLRAEDTAVYFCARHDYSNYFFFDYWGQGTLVTVSSGGGGSGGGGSGGGGSDIQMTQSPSSLSASVGDRVTITCRASQGISNYLAWYQQKPGKVPKLLIYAASILQSGVPSKFSGSGSGTDFTLTISSLQPEDFAIYYCQQYFAYPITFGQGTRLEIKSGGGGSEVQLVESGGGLVQPGGSLKLSCAASGFTFNKYAMNWVRQAPGKGLEWVARIRSKYNNYATYYADSVKDRFTISRDDSKNTAYLQMNNLKTEDTAVYYCVRHGNFGNSYISYWAYWGQGTLVTVSSGGGGSGGGGSGGGGSQTVVTQEPSLTVSPGGTVTLTCGSSTGAVTSGNYPNWVQQKPGQAPRGLIGGTKFLAPGTPARFSGSLLGGKAALTLSGVQPEDEAEYYCVLWYSNRWVFGGGTKLTVLGGGGDKTHTCPPCPAPELLGGPSVFLFPPKPKDTLMISRTPEVTCVVVDVSHEDPEVKFNWYVDGVEVHNAKTKPCEEQYGSTYRCVSVLTVLHQDWLNGKEYKCKVSNKALPAPIEKTISKAKGQPREPQVYTLPPSREEMTKNQVSLTCLVKGFYPSDIAVEWESNGQPENNYKTTPPVLDSDGSFFLYSKLTVDKSRWQQGNVFSCSVMHEALHNHYTQKSLSLSPGGGGSGGGGSGGGGSGGGGSGGGGSGGGGSDKTHTCPPCPAPELLGGPSVFLFPPKPKDTLMISRTPEVTCVVVDVSHEDPEVKFNWYVDGVEVHNAKTKPCEEQYGSTYRCVSVLTVLHQDWLNGKEYKCKVSNKALPAPIEKTISKAKGQPREPQVYTLPPSREEMTKNQVSLTCLVKGFYPSDIAVEWESNGQPENNYKTTPPVLDSDGSFFLYSKLTVDKSRWQQGNVFSCSVMHEALHNHYTQKSLSLSPGK

SEQ ID NO: 1240 - protein, 984 aa, Artificial Sequence
  Synthetic peptide
EVQLLESGGGMVQPGGSLRLSCAASGFTFSSYAMSWVRQAPGKCLEWVSAISGSGGRTFYAESVEGRFTISRDNSKNTLYLQMNSLRAEDTAVYYCAKHDYSNYPYFDYWGQGTLVTVSSGGGGSGGGGSGGGGSEIVLTQSPGTLSLSPGERATLSCRASQSVRSSYLAWYQQKPGQAPRLLIYGASSRATGIPDRFSGSGSGTDFTLTISRLEPEDFAVYFCQQYGSSPPTFGCGTRLEIKSGGGGSEVQLVESGGGLVQPGGSLKLSCAASGFTFNKYAMNWVRQAPGKGLEWVARIRSKYNNYATYYADSVKDRFTISRDDSKNTAYLQMNNLKTEDTAVYYCVRHGNFGNSYISYWAYWGQGTLVTVSSGGGGSGGGGSGGGGSQTVVTQEPSLTVSPGGTVTLTCGSSTGAVTSGNYPNWVQQKPGQAPRGLIGGTKFLAPGTPARFSGSLLGGKAALTLSGVQPEDEAEYYCVLWYSNRWVFGGGTKLTVLGGGGDKTHTCPPCPAPELLGGPSVFLFPPKPKDTLMISRTPEVTCVVVDVSHEDPEVKFNWYVDGVEVHNAKTKPCEEQYGSTYRCVSVLTVLHQDWLNGKEYKCKVSNKALPAPIEKTISKAKGQPREPQVYTLPPSREEMTKNQVSLTCLVKGFYPSDIAVEWESNGQPENNYKTTPPVLDSDGSFFLYSKLTVDKSRWQQGNVFSCSVMHEALHNHYTQKSLSLSPGGGGSGGGGSGGGGSGGGGSGGGGSGGGGSDKTHTCPPCPAPELLGGPSVFLFPPKPKDTLMISRTPEVTCVVVDVSHEDPEVKFNWYVDGVEVHNAKTKPCEEQYGSTYRCVSVLTVLHQDWLNGKEYKCKVSNKALPAPIEKTISKAKGQPREPQVYTLPPSREEMTKNQVSLTCLVKGFYPSDIAVEWESNGQPENNYKTTPPVLDSDGSFFLYSKLTVDKSRWQQGNVFSCSVMHEALHNHYTQKSLSLSPGK

SEQ ID NO: 1241 - protein, 984 aa, Artificial Sequence
  Synthetic peptide
EVQLLESGGGMVQPGGSLRLSCAASGFTFSSYAMSWVRQAPGKGLEWVSAISGSGGRTFYAESVEGRFTISRDNSKNTLYLQMNSLRAEDTAVYYCAKHDYSNYPYFDYWGQGTLVTVSSGGGGSGGGGSGGGGSEIVLTQSPGTLSLSPGERATLSCRASQSVRSSYLAWYQQKPGQAPRLLIYGASSRATGIPDRFSGSGSGTDFTLTISRLEPEDFAVYFCQQYGSSPPTFGGGTRLEIKSGGGGSEVQLVESGGGLVQPGGSLKLSCAASGFTFNKYAMNWVRQAPGKGLEWVARIRSKYNNYATYYADSVKDRFTISRDDSKNTAYLQMNNLKTEDTAVYYCVRHGNFGNSYISYWAYWGQGTLVTVSSGGGGSGGGGSGGGGSQTVVTQEPSLTVSPGGTVTLTCGSSTGAVTSGNYPNWVQQKPGQAPRGLIGGTKFLAPGTPARFSGSLLGGKAALTLSGVQPEDEAEYYCVLWYSNRWVFGGGTKLTVLGGGGDKTHTCPPCPAPELLGGPSVFLFPPKPKDTLMISRTPEVTCVVVDVSHEDPEVKFNWYVDGVEVHNAKTKPCEEQYGSTYRCVSVLTVLHQDWLNGKEYKCKVSNKALPAPIEKTISKAKGQPREPQVYTLPPSREEMTKNQVSLTCLVKGFYPSDIAVEWESNGQPENNYKTTPPVLDSDGSFFLYSKLTVDKSRWQQGNVFSCSVMHEALHNHYTQKSLSLSPGGGGSGGGGSGGGGSGGGGSGGGGSGGGGSDKTHTCPPCPAPELLGGPSVFLFPPKPKDTLMISRTPEVTCVVVDVSHEDPEVKFNWYVDGVEVHNAKTKPCEEQYGSTYRCVSVLTVLHQDWLNGKEYKCKVSNKALPAPIEKTISKAKGQPREPQVYTLPPSREEMTKNQVSLTCLVKGFYPSDIAVEWESNGQPENNYKTTPPVLDSDGSFFLYSKLTVDKSRWQQGNVFSCSVMHEALHNHYTQKSLSLSPGK

SEQ ID NO: 1242 - protein, 984 aa, Artificial Sequence
  Synthetic peptide
EVQLLESGGGLVQPGGSLRLSCAASGFTFSIYAMSWVRQAPGKCLEWVSAIGGSGGSTFYAESVKGRFTISRDNSKNTLYLQMNSLRAEDTAVYYCAKHDYSNYPYFDYWGQGTLVTVSSGGGGSGGGGSGGGGSEIVLTQSPGTLSLSPGERATLSCRASQSVRSSYVAWYQQKPGQAPRLLIYGASSRATGIPDRFSGSGSGTDFTLTISRLEPEDFAVYYCQQYGDLPFTFGCGTRLEIKSGGGGSEVQLVESGGGLVQPGGSLKLSCAASGFTFNKYAMNWVRQAPGKGLEWVARIRSKYNNYATYYADSVKDRFTISRDDSKNTAYLQMNNLKTEDTAVYYCVRHGNFGNSYISYWAYWGQGTLVTVSSGGGGSGGGGSGGGGSQTVVTQEPSLTVSPGGTVTLTCGSSTGAVTSGNYPNWVQQKPGQAPRGLIGGTKFLAPGTPARFSGSLLGGKAALTLSGVQPEDEAEYYCVLWYSNRWVFGGGTKLTVLGGGGDKTHTCPPCPAPELLGGPSVFLFPPKPKDTLMISRTPEVTCVVVDVSHEDPEVKFNWYVDGVEVHNAKTKPCEEQYGSTYRCVSVLTVLHQDWLNGKEYKCKVSNKALPAPIEKTISKAKGQPREPQVYTLPPSREEMTKNQVSLTCLVKGFYPSDIAVEWESNGQPENNYKTTPPVLDSDGSFFLYSKLTVDKSRWQQGNVFSCSVMHEALHNHYTQKSLSLSPGGGGSGGGGSGGGGSGGGGSGGGGSGGGGSDKTHTCPPCPAPELLGGPSVFLFPPKPKDTLMISRTPEVTCVVVDVSHEDPEVKFNWYVDGVEVHNAKTKPCEEQYGSTYRCVSVLTVLHQDWLNGKEYKCKVSNKALPAPIEKTISKAKGQPREPQVYTLPPSREEMTKNQVSLTCLVKGFYPSDIAVEWESNGQPENNYKTTPPVLDSDGSFFLYSKLTVDKSRWQQGNVFSCSVMHEALHNHYTQKSLSLSPGK

SEQ ID NO: 1243 - protein, 984 aa, Artificial Sequence
  Synthetic peptide
EVQLLESGGGLVQPGGSLRLSCAASGFTFSIYAMSWVRQAPGKGLEWVSAIGGSGGSTFYAESVKGRFTISRDNSKNTLYLQMNSLRAEDTAVYYCAKHDYSNYPYFDYWGQGTLVTVSSGGGGSGGGGSGGGGSEIVLTQSPGTLSLSPGERATLSCRASQSVRSSYVAWYQQKPGQAPRLLIYGASSRATGIPDRFSGSGSGTDFTLTISRLEPEDFAVYYCQQYGDLPFTFGPGTRLEIKSGGGGSEVQLVESGGGLVQPGGSLKLSCAASGFTFNKYAMNWVRQAPGKGLEWVARIRSKYNNYATYYADSVKDRFTISRDDSKNTAYLQMNNLKTEDTAVYYCVRHGNFGNSYISYWAYWGQGTLVTVSSGGGGSGGGGSGGGGSQTVVTQEPSLTVSPGGTVTLTCGSSTGAVTSGNYPNWVQQKPGQAPRGLIGGTKFLAPGTPARFSGSLLGGKAALTLSGVQPEDEAEYYCVLWYSNRWVFGGGTKLTVLGGGGDKTHTCPPCPAPELLGGPSVFLFPPKPKDTLMISRTPEVTCVVVDVSHEDPEVKFNWYVDGVEVHNAKTKPCEEQYGSTYRCVSVLTVLHQDWLNGKEYKCKVSNKALPAPIEKTISKAKGQPREPQVYTLPPSREEMTKNQVSLTCLVKGFYPSDIAVEWESNGQPENNYKTTPPVLDSDGSFFLYSKLTVDKSRWQQGNVFSCSVMHEALHNHYTQKSLSLSPGGGGSGGGGSGGGGSGGGGSGGGGSGGGGSDKTHTCPPCPAPELLGGPSVFLFPPKPKDTLMISRTPEVTCVVVDVSHEDPEVKFNWYVDGVEVHNAKTKPCEEQYGSTYRCVSVLTVLHQDWLNGKEYKCKVSNKALPAPIEKTISKAKGQPREPQVYTLPPSREEMTKNQVSLTCLVKGFYPSDIAVEWESNGQPENNYKTTPPVLDSDGSFFLYSKLTVDKSRWQQGNVFSCSVMHEALHNHYTQKSLSLSPGK

SEQ ID NO: 1244 - protein, 988 aa, Artificial Sequence
  Synthetic peptide
QVQLQESGPGLVKPSQTLSLTCTVSGGSISSSSYYWGWIRQPPGKCLEWIGSIYHSGGTYFNPSLKSRVTISVDTSKNQFSLKLSSVTAADTAVYYCARHYEILTGYYPDVFDIWGQGTMVTVSSGGGGSGGGGSGGGGSDIQMTQSPSSLSASVGDRVTITCRASQSISSYLNWYQQKPGKAPKLLIYAASNLQSGVSSRFSGSGSGTDFTLTISSLQPEDFATYYCQQSFSSPRTFGCGTKVEIKSGGGGSEVQLVESGGGLVQPGGSLKLSCAASGFTFNKYAMNWVRQAPGKGLEWVARIRSKYNNYATYYADSVKDRFTISRDDSKNTAYLQMNNLKTEDTAVYYCVRHGNFGNSYISYWAYWGQGTLVTVSSGGGGSGGGGSGGGGSQTVVTQEPSLTVSPGGTVTLTCGSSTGAVTSGNYPNWVQQKPGQAPRGLIGGTKFLAPGTPARFSGSLLGGKAALTLSGVQPEDEAEYYCVLWYSNRWVFGGGTKLTVLGGGGDKTHTCPPCPAPELLGGPSVFLFPPKPKDTLMISRTPEVTCVVVDVSHEDPEVKFNWYVDGVEVHNAKTKPCEEQYGSTYRCVSVLTVLHQDWLNGKEYKCKVSNKALPAPIEKTISKAKGQPREPQVYTLPPSREEMTKNQVSLTCLVKGFYPSDIAVEWESNGQPENNYKTTPPVLDSDGSFFLYSKLTVDKSRWQQGNVFSCSVMHEALHNHYTQKSLSLSPGGGGSGGGGSGGGGSGGGGSGGGGSGGGGSDKTHTCPPCPAPELLGGPSVFLFPPKPKDTLMISRTPEVTCVVVDVSHEDPEVKFNWYVDGVEVHNAKTKPCEEQYGSTYRCVSVLTVLHQDWLNGKEYKCKVSNKALPAPIEKTISKAKGQPREPQVYTLPPSREEMTKNQVSLTCLVKGFYPSDIAVEWESNGQPENNYKTTPPVLDSDGSFFLYSKLTVDKSRWQQGNVFSCSVMHEALHNHYTQKSLSLSPGK

SEQ ID NO: 1245 - protein, 988 aa, Artificial Sequence
  Synthetic peptide
QVQLQESGPGLVKPSQTLSLTCTVSGGSISSSSYYWGWIRQPPGKGLEWIGSIYHSGGTYFNPSLKSRVTISVDTSKNQFSLKLSSVTAADTAVYYCARHYEILTGYYPDVFDIWGQGTMVTVSSGGGGSGGGGSGGGGSDIQMTQSPSSLSASVGDRVTITCRASQSISSYLNWYQQKPGKAPKLLIYAASNLQSGVSSRFSGSGSGTDFTLTISSLQPEDFATYYCQQSFSSPRTFGQGTKVEIKSGGGGSEVQLVESGGGLVQPGGSLKLSCAASGFTFNKYAMNWVRQAPGKGLEWVARIRSKYNNYATYYADSVKDRFTISRDDSKNTAYLQMNNLKTEDTAVYYCVRHGNFGNSYISYWAYWGQGTLVTVSSGGGGSGGGGSGGGGSQTVVTQEPSLTVSPGGTVTLTCGSSTGAVTSGNYPNWVQQKPGQAPRGLIGGTKFLAPGTPARFSGSLLGGKAALTLSGVQPEDEAEYYCVLWYSNRWVFGGGTKLTVLGGGGDKTHTCPPCPAPELLGGPSVFLFPPKPKDTLMISRTPEVTCVVVDVSHEDPEVKFNWYVDGVEVHNAKTKPCEEQYGSTYRCVSVLTVLHQDWLNGKEYKCKVSNKALPAPIEKTISKAKGQPREPQVYTLPPSREEMTKNQVSLTCLVKGFYPSDIAVEWESNGQPENNYKTTPPVLDSDGSFFLYSKLTVDKSRWQQGNVFSCSVMHEALHNHYTQKSLSLSPGGGGSGGGGSGGGGSGGGGSGGGGSGGGGSDKTHTCPPCPAPELLGGPSVFLFPPKPKDTLMISRTPEVTCVVVDVSHEDPEVKFNWYVDGVEVHNAKTKPCEEQYGSTYRCVSVLTVLHQDWLNGKEYKCKVSNKALPAPIEKTISKAKGQPREPQVYTLPPSREEMTKNQVSLTCLVKGFYPSDIAVEWESNGQPENNYKTTPPVLDSDGSFFLYSKLTVDKSRWQQGNVFSCSVMHEALHNHYTQKSLSLSPGK

SEQ ID NO: 1246 - protein, 983 aa, Artificial Sequence
  Synthetic peptide
EVQLVESGGGLVKPGGSLRLSCAASGFTFSSYSMNWVRQAPGKCLEWVSYISSSGGYIYYAESVKGRFTISRDNAKNSLYLQMNSLRAEDAAVYYCSRGDYSNYAYFDYWGQGTLVTVSSGGGGSGGGGSGGGGSDIQMTQSPSSLSASVGDRVTITCRASQGISNYLAWYQQKPGKVPKLLIYAASTLQSGVPSRFSGSGSGTDFTLTISSLQAEDVAVYYCQQYYSTPLTFGCGTKVEIKSGGGGSEVQLVESGGGLVQPGGSLKLSCAASGFTFNKYAMNWVRQAPGKGLEWVARIRSKYNNYATYYADSVKDRFTISRDDSKNTAYLQMNNLKTEDTAVYYCVRHGNFGNSYISYWAYWGQGTLVTVSSGGGGSGGGGSGGGGSQTVVTQEPSLTVSPGGTVTLTCGSSTGAVTSGNYPNWVQQKPGQAPRGLIGGTKFLAPGTPARFSGSLLGGKAALTLSGVQPEDEAEYYCVLWYSNRWVFGGGTKLTVLGGGGDKTHTCPPCPAPELLGGPSVFLFPPKPKDTLMISRTPEVTCVVVDVSHEDPEVKFNWYVDGVEVHNAKTKPCEEQYGSTYRCVSVLTVLHQDWLNGKEYKCKVSNKALPAPIEKTISKAKGQPREPQVYTLPPSREEMTKNQVSLTCLVKGFYPSDIAVEWESNGQPENNYKTTPPVLDSDGSFFLYSKLTVDKSRWQQGNVFSCSVMHEALHNHYTQKSLSLSPGGGGSGGGGSGGGGSGGGGSGGGGSGGGGSDKTHTCPPCPAPELLGGPSVFLFPPKPKDTLMISRTPEVTCVVVDVSHEDPEVKFNWYVDGVEVHNAKTKPCEEQYGSTYRCVSVLTVLHQDWLNGKEYKCKVSNKALPAPIEKTISKAKGQPREPQVYTLPPSREEMTKNQVSLTCLVKGFYPSDIAVEWESNGQPENNYKTTPPVLDSDGSFFLYSKLTVDKSRWQQGNVFSCSVMHEALHNHYTQKSLSLSPGK

SEQ ID NO: 1247 - protein, 983 aa, Artificial Sequence
  Synthetic peptide
EVQLVESGGGLVKPGGSLRLSCAASGFTFSSYSMNWVRQAPGKGLEWVSYISSSGGYIYYAESVKGRFTISRDNAKNSLYLQMNSLRAEDAAVYYCSRGDYSNYAYFDYWGQGTLVTVSSGGGGSGGGGSGGGGSDIQMTQSPSSLSASVGDRVTITCRASQGISNYLAWYQQKPGKVPKLLIYAASTLQSGVPSRFSGSGSGTDFTLTISSLQAEDVAVYYCQQYYSTPLTFGGGTKVEIKSGGGGSEVQLVESGGGLVQPGGSLKLSCAASGFTFNKYAMNWVRQAPGKGLEWVARIRSKYNNYATYYADSVKDRFTISRDDSKNTAYLQMNNLKTEDTAVYYCVRHGNFGNSYISYWAYWGQGTLVTVSSGGGGSGGGGSGGGGSQTVVTQEPSLTVSPGGTVTLTCGSSTGAVTSGNYPNWVQQKPGQAPRGLIGGTKFLAPGTPARFSGSLLGGKAALTLSGVQPEDEAEYYCVLWYSNRWVFGGGTKLTVLGGGGDKTHTCPPCPAPELLGGPSVFLFPPKPKDTLMISRTPEVTCVVVDVSHEDPEVKFNWYVDGVEVHNAKTKPCEEQYGSTYRCVSVLTVLHQDWLNGKEYKCKVSNKALPAPIEKTISKAKGQPREPQVYTLPPSREEMTKNQVSLTCLVKGFYPSDIAVEWESNGQPENNYKTTPPVLDSDGSFFLYSKLTVDKSRWQQGNVFSCSVMHEALHNHYTQKSLSLSPGGGGSGGGGSGGGGSGGGGSGGGGSGGGGSDKTHTCPPCPAPELLGGPSVFLFPPKPKDTLMISRTPEVTCVVVDVSHEDPEVKFNWYVDGVEVHNAKTKPCEEQYGSTYRCVSVLTVLHQDWLNGKEYKCKVSNKALPAPIEKTISKAKGQPREPQVYTLPPSREEMTKNQVSLTCLVKGFYPSDIAVEWESNGQPENNYKTTPPVLDSDGSFFLYSKLTVDKSRWQQGNVFSCSVMHEALHNHYTQKSLSLSPGK

SEQ ID NO: 1248 - protein, 984 aa, Artificial Sequence
  Synthetic peptide
EVQLLESGGGLVQPGGSLRLSCAASGFTFSVYAMSWVRQAPGKCLEWVSTISGSGGSTFYAESVKGRFTISRDNSKNTLYLQMNRLRAEDTAVYYCARHDYSNYAYFDYWGQGTLVTVSSGGGGSGGGGSGGGGSEIVLTQSPGTLSLSPGERATLSCRASQSVRSSYLAWYQQKPGQAPRLLIYGASSRATGIPDRFSGSGSGTDFTLTISRLEPEDFAVYYCQQYGDLPFTFGCGTKVEIKSGGGGSEVQLVESGGGLVQPGGSLKLSCAASGFTFNKYAMNWVRQAPGKGLEWVARIRSKYNNYATYYADSVKDRFTISRDDSKNTAYLQMNNLKTEDTAVYYCVRHGNFGNSYISYWAYWGQGTLVTVSSGGGGSGGGGSGGGGSQTVVTQEPSLTVSPGGTVTLTCGSSTGAVTSGNYPNWVQQKPGQAPRGLIGGTKFLAPGTPARFSGSLLGGKAALTLSGVQPEDEAEYYCVLWYSNRWVFGGGTKLTVLGGGGDKTHTCPPCPAPELLGGPSVFLFPPKPKDTLMISRTPEVTCVVVDVSHEDPEVKFNWYVDGVEVHNAKTKPCEEQYGSTYRCVSVLTVLHQDWLNGKEYKCKVSNKALPAPIEKTISKAKGQPREPQVYTLPPSREEMTKNQVSLTCLVKGFYPSDIAVEWESNGQPENNYKTTPPVLDSDGSFFLYSKLTVDKSRWQQGNVFSCSVMHEALHNHYTQKSLSLSPGGGGSGGGGSGGGGSGGGGSGGGGSGGGGSDKTHTCPPCPAPELLGGPSVFLFPPKPKDTLMISRTPEVTCVVVDVSHEDPEVKFNWYVDGVEVHNAKTKPCEEQYGSTYRCVSVLTVLHQDWLNGKEYKCKVSNKALPAPIEKTISKAKGQPREPQVYTLPPSREEMTKNQVSLTCLVKGFYPSDIAVEWESNGQPENNYKTTPPVLDSDGSFFLYSKLTVDKSRWQQGNVFSCSVMHEALHNHYTQKSLSLSPGK

SEQ ID NO: 1249 - protein, 984 aa, Artificial Sequence
  Synthetic peptide
EVQLLESGGGLVQPGGSLRLSCAASGFTFSVYAMSWVRQAPGKGLEWVSTISGSGGSTFYAESVKGRFTISRDNSKNTLYLQMNRLRAEDTAVYYCARHDYSNYAYFDYWGQGTLVTVSSGGGGSGGGGSGGGGSEIVLTQSPGTLSLSPGERATLSCRASQSVRSSYLAWYQQKPGQAPRLLIYGASSRATGIPDRFSGSGSGTDFTLTISRLEPEDFAVYYCQQYGDLPFTFGPGTKVEIKSGGGGSEVQLVESGGGLVQPGGSLKLSCAASGFTFNKYAMNWVRQAPGKGLEWVARIRSKYNNYATYYADSVKDRFTISRDDSKNTAYLQMNNLKTEDTAVYYCVRHGNFGNSYISYWAYWGQGTLVTVSSGGGGSGGGGSGGGGSQTVVTQEPSLTVSPGGTVTLTCGSSTGAVTSGNYPNWVQQKPGQAPRGLIGGTKFLAPGTPARFSGSLLGGKAALTLSGVQPEDEAEYYCVLWYSNRWVFGGGTKLTVLGGGGDKTHTCPPCPAPELLGGPSVFLFPPKPKDTLMISRTPEVTCVVVDVSHEDPEVKFNWYVDGVEVHNAKTKPCEEQYGSTYRCVSVLTVLHQDWLNGKEYKCKVSNKALPAPIEKTISKAKGQPREPQVYTLPPSREEMTKNQVSLTCLVKGFYPSDIAVEWESNGQPENNYKTTPPVLDSDGSFFLYSKLTVDKSRWQQGNVFSCSVMHEALHNHYTQKSLSLSPGGGGSGGGGSGGGGSGGGGSGGGGSGGGGSDKTHTCPPCPAPELLGGPSVFLFPPKPKDTLMISRTPEVTCVVVDVSHEDPEVKFNWYVDGVEVHNAKTKPCEEQYGSTYRCVSVLTVLHQDWLNGKEYKCKVSNKALPAPIEKTISKAKGQPREPQVYTLPPSREEMTKNQVSLTCLVKGFYPSDIAVEWESNGQPENNYKTTPPVLDSDGSFFLYSKLTVDKSRWQQGNVFSCSVMHEALHNHYTQKSLSLSPGK

SEQ ID NO: 1250 - protein, 987 aa, Artificial Sequence
  Synthetic peptide
QVQLVESGGGVVQPGRSLRLSCAASGFMFSSYGMHWVRQAPGKCLEWVAVISYEGSNKYYAESVKGRFTISRDNSKNTLYLQMNSLRAEDTAVYYCARGRYYGSGNYNHGMDVWGQGTTVTVSSGGGGSGGGGSGGGGSDIQMTQSPSSLSASVGDRVTITCRASQSISSYLNWYQQKPGKAPKLLIYAASSLQSGVPSRFSGRGSGTDFTLTISSLQPEDFATYYCQQSYSTPFTFGCGTKVEIKSGGGGSEVQLVESGGGLVQPGGSLKLSCAASGFTFNKYAMNWVRQAPGKGLEWVARIRSKYNNYATYYADSVKDRFTISRDDSKNTAYLQMNNLKTEDTAVYYCVRHGNFGNSYISYWAYWGQGTLVTVSSGGGGSGGGGSGGGGSQTVVTQEPSLTVSPGGTVTLTCGSSTGAVTSGNYPNWVQQKPGQAPRGLIGGTKFLAPGTPARFSGSLLGGKAALTLSGVQPEDEAEYYCVLWYSNRWVFGGGTKLTVLGGGGDKTHTCPPCPAPELLGGPSVFLFPPKPKDTLMISRTPEVTCVVVDVSHEDPEVKFNWYVDGVEVHNAKTKPCEEQYGSTYRCVSVLTVLHQDWLNGKEYKCKVSNKALPAPIEKTISKAKGQPREPQVYTLPPSREEMTKNQVSLTCLVKGFYPSDIAVEWESNGQPENNYKTTPPVLDSDGSFFLYSKLTVDKSRWQQGNVFSCSVMHEALHNHYTQKSLSLSPGGGGSGGGGSGGGGSGGGGSGGGGSGGGGSDKTHTCPPCPAPELLGGPSVFLFPPKPKDTLMISRTPEVTCVVVDVSHEDPEVKFNWYVDGVEVHNAKTKPCEEQYGSTYRCVSVLTVLHQDWLNGKEYKCKVSNKALPAPIEKTISKAKGQPREPQVYTLPPSREEMTKNQVSLTCLVKGFYPSDIAVEWESNGQPENNYKTTPPVLDSDGSFFLYSKLTVDKSRWQQGNVFSCSVMHEALHNHYTQKSLSLSPGK

SEQ ID NO: 1251 - protein, 987 aa, Artificial Sequence
  Synthetic peptide
QVQLVESGGGVVQPGRSLRLSCAASGFMFSSYGMHWVRQAPGKGLEWVAVISYEGSNKYYAESVKGRFTISRDNSKNTLYLQMNSLRAEDTAVYYCARGRYYGSGNYNHGMDVWGQGTTVTVSSGGGGSGGGGSGGGGSDIQMTQSPSSLSASVGDRVTITCRASQSISSYLNWYQQKPGKAPKLLIYAASSLQSGVPSRFSGRGSGTDFTLTISSLQPEDFATYYCQQSYSTPFTFGPGTKVEIKSGGGGSEVQLVESGGGLVQPGGSLKLSCAASGFTFNKYAMNWVRQAPGKGLEWVARIRSKYNNYATYYADSVKDRFTISRDDSKNTAYLQMNNLKTEDTAVYYCVRHGNFGNSYISYWAYWGQGTLVTVSSGGGGSGGGGSGGGGSQTVVTQEPSLTVSPGGTVTLTCGSSTGAVTSGNYPNWVQQKPGQAPRGLIGGTKFLAPGTPARFSGSLLGGKAALTLSGVQPEDEAEYYCVLWYSNRWVFGGGTKLTVLGGGGDKTHTCPPCPAPELLGGPSVFLFPPKPKDTLMISRTPEVTCVVVDVSHEDPEVKFNWYVDGVEVHNAKTKPCEEQYGSTYRCVSVLTVLHQDWLNGKEYKCKVSNKALPAPIEKTISKAKGQPREPQVYTLPPSREEMTKNQVSLTCLVKGFYPSDIAVEWESNGQPENNYKTTPPVLDSDGSFFLYSKLTVDKSRWQQGNVFSCSVMHEALHNHYTQKSLSLSPGGGGSGGGGSGGGGSGGGGSGGGGSGGGGSDKTHTCPPCPAPELLGGPSVFLFPPKPKDTLMISRTPEVTCVVVDVSHEDPEVKFNWYVDGVEVHNAKTKPCEEQYGSTYRCVSVLTVLHQDWLNGKEYKCKVSNKALPAPIEKTISKAKGQPREPQVYTLPPSREEMTKNQVSLTCLVKGFYPSDIAVEWESNGQPENNYKTTPPVLDSDGSFFLYSKLTVDKSRWQQGNVFSCSVMHEALHNHYTQKSLSLSPGK

SEQ ID NO: 1252 - protein, 986 aa, Artificial Sequence
  Synthetic peptide
QVQLVESGGGVVQPGRSLRLSCAASGFTFSSYGMHWVRQAPGKCLEWVAVTWYDASNKYYGDAVKGRFTISRDNSKNTLYLQMNSLRAEDTAVYYCARDLLRGVKGYAMDVWGQGTTVTVSSGGGGSGGGGSGGGGSEIVLTQSPGTLSLSPGERATLSCRASQSLRRIYLAWYQQKPGQAPRLLIYDVFDRATGIPDRFSGGGSGTDFTLTISRLEPEDFAVYYCQQYSESPFTFGCGTKVDIKSGGGGSEVQLVESGGGLVQPGGSLKLSCAASGFTFNKYAMNWVRQAPGKGLEWVARIRSKYNNYATYYADSVKDRFTISRDDSKNTAYLQMNNLKTEDTAVYYCVRHGNFGNSYISYWAYWGQGTLVTVSSGGGGSGGGGSGGGGSQTVVTQEPSLTVSPGGTVTLTCGSSTGAVTSGNYPNWVQQKPGQAPRGLIGGTKFLAPGTPARFSGSLLGGKAALTLSGVQPEDEAEYYCVLWYSNRWVFGGGTKLTVLGGGGDKTHTCPPCPAPELLGGPSVFLFPPKPKDTLMISRTPEVTCVVVDVSHEDPEVKFNWYVDGVEVHNAKTKPCEEQYGSTYRCVSVLTVLHQDWLNGKEYKCKVSNKALPAPIEKTISKAKGQPREPQVYTLPPSREEMTKNQVSLTCLVKGFYPSDIAVEWESNGQPENNYKTTPPVLDSDGSFFLYSKLTVDKSRWQQGNVFSCSVMHEALHNHYTQKSLSLSPGGGGSGGGGSGGGGSGGGGSGGGGSGGGGSDKTHTCPPCPAPELLGGPSVFLFPPKPKDTLMISRTPEVTCVVVDVSHEDPEVKFNWYVDGVEVHNAKTKPCEEQYGSTYRCVSVLTVLHQDWLNGKEYKCKVSNKALPAPIEKTISKAKGQPREPQVYTLPPSREEMTKNQVSLTCLVKGFYPSDIAVEWESNGQPENNYKTTPPVLDSDGSFFLYSKLTVDKSRWQQGNVFSCSVMHEALHNHYTQKSLSLSPGK

SEQ ID NO: 1253 - protein, 986 aa, Artificial Sequence
  Synthetic peptide
QVQLVESGGGVVQPGRSLRLSCAASGFTFSSYGMHWVRQAPGKGLEWVAVTWYDASNKYYGDAVKGRFTISRDNSKNTLYLQMNSLRAEDTAVYYCARDLLRGVKGYAMDVWGQGTTVTVSSGGGGSGGGGSGGGGSEIVLTQSPGTLSLSPGERATLSCRASQSLRRIYLAWYQQKPGQAPRLLIYDVFDRATGIPDRFSGGGSGTDFTLTISRLEPEDFAVYYCQQYSESPFTFGPGTKVDIKSGGGGSEVQLVESGGGLVQPGGSLKLSCAASGFTFNKYAMNWVRQAPGKGLEWVARIRSKYNNYATYYADSVKDRFTISRDDSKNTAYLQMNNLKTEDTAVYYCVRHGNFGNSYISYWAYWGQGTLVTVSSGGGGSGGGGSGGGGSQTVVTQEPSLTVSPGGTVTLTCGSSTGAVTSGNYPNWVQQKPGQAPRGLIGGTKFLAPGTPARFSGSLLGGKAALTLSGVQPEDEAEYYCVLWYSNRWVFGGGTKLTVLGGGGDKTHTCPPCPAPELLGGPSVFLFPPKPKDTLMISRTPEVTCVVVDVSHEDPEVKFNWYVDGVEVHNAKTKPCEEQYGSTYRCVSVLTVLHQDWLNGKEYKCKVSNKALPAPIEKTISKAKGQPREPQVYTLPPSREEMTKNQVSLTCLVKGFYPSDIAVEWESNGQPENNYKTTPPVLDSDGSFFLYSKLTVDKSRWQQGNVFSCSVMHEALHNHYTQKSLSLSPGGGGSGGGGSGGGGSGGGGSGGGGSGGGGSDKTHTCPPCPAPELLGGPSVFLFPPKPKDTLMISRTPEVTCVVVDVSHEDPEVKFNWYVDGVEVHNAKTKPCEEQYGSTYRCVSVLTVLHQDWLNGKEYKCKVSNKALPAPIEKTISKAKGQPREPQVYTLPPSREEMTKNQVSLTCLVKGFYPSDIAVEWESNGQPENNYKTTPPVLDSDGSFFLYSKLTVDKSRWQQGNVFSCSVMHEALHNHYTQKSLSLSPGK

SEQ ID NO: 1254 - protein, 987 aa, Artificial Sequence
  Synthetic peptide
QVQLVQSGAEVKKPGASVKVSCKASGYTFTSYGISWVRQAPGQCLEWMGWISAYQGYTHYAQKLQGRVTMTTDTSTSTAYMELRSLRSDDTAVYYCARDYGGNDYYGMDVWGQGTTVTVSSGGGGSGGGGSGGGGSQSVLTQPPSASGTPGQRVTISCSGSSSNIGINYVYWYQQLPGTAPKLLIYRSDQRPSGVPDRFSGSKSGTSASLALSGLRSEDEADYYCAAFDESLSGVVFGCGTKLTVLSGGGGSEVQLVESGGGLVQPGGSLKLSCAASGFTFNKYAMNWVRQAPGKGLEWVARIRSKYNNYATYYADSVKDRFTISRDDSKNTAYLQMNNLKTEDTAVYYCVRHGNFGNSYISYWAYWGQGTLVTVSSGGGGSGGGGSGGGGSQTVVTQEPSLTVSPGGTVTLTCGSSTGAVTSGNYPNWVQQKPGQAPRGLIGGTKFLAPGTPARFSGSLLGGKAALTLSGVQPEDEAEYYCVLWYSNRWVFGGGTKLTVLGGGGDKTHTCPPCPAPELLGGPSVFLFPPKPKDTLMISRTPEVTCVVVDVSHEDPEVKFNWYVDGVEVHNAKTKPCEEQYGSTYRCVSVLTVLHQDWLNGKEYKCKVSNKALPAPIEKTISKAKGQPREPQVYTLPPSREEMTKNQVSLTCLVKGFYPSDIAVEWESNGQPENNYKTTPPVLDSDGSFFLYSKLTVDKSRWQQGNVFSCSVMHEALHNHYTQKSLSLSPGGGGSGGGGSGGGGSGGGGSGGGGSGGGGSDKTHTCPPCPAPELLGGPSVFLFPPKPKDTLMISRTPEVTCVVVDVSHEDPEVKFNWYVDGVEVHNAKTKPCEEQYGSTYRCVSVLTVLHQDWLNGKEYKCKVSNKALPAPIEKTISKAKGQPREPQVYTLPPSREEMTKNQVSLTCLVKGFYPSDIAVEWESNGQPENNYKTTPPVLDSDGSFFLYSKLTVDKSRWQQGNVFSCSVMHEALHNHYTQKSLSLSPGK

SEQ ID NO: 1255 - protein, 987 aa, Artificial Sequence
  Synthetic peptide
QVQLVQSGAEVKKPGASVKVSCKASGYTFTSYGISWVRQAPGQGLEWMGWISAYQGYTHYAQKLQGRVTMTTDTSTSTAYMELRSLRSDDTAVYYCARDYGGNDYYGMDVWGQGTTVTVSSGGGGSGGGGSGGGGSQSVLTQPPSASGTPGQRVTISCSGSSSNIGINYVYWYQQLPGTAPKLLIYRSDQRPSGVPDRFSGSKSGTSASLALSGLRSEDEADYYCAAFDESLSGVVFGGGTKLTVLSGGGGSEVQLVESGGGLVQPGGSLKLSCAASGFTFNKYAMNWVRQAPGKGLEWVARIRSKYNNYATYYADSVKDRFTISRDDSKNTAYLQMNNLKTEDTAVYYCVRHGNFGNSYISYWAYWGQGTLVTVSSGGGGSGGGGSGGGGSQTVVTQEPSLTVSPGGTVTLTCGSSTGAVTSGNYPNWVQQKPGQAPRGLIGGTKFLAPGTPARFSGSLLGGKAALTLSGVQPEDEAEYYCVLWYSNRWVFGGGTKLTVLGGGGDKTHTCPPCPAPELLGGPSVFLFPPKPKDTLMISRTPEVTCVVVDVSHEDPEVKFNWYVDGVEVHNAKTKPCEEQYGSTYRCVSVLTVLHQDWLNGKEYKCKVSNKALPAPIEKTISKAKGQPREPQVYTLPPSREEMTKNQVSLTCLVKGFYPSDIAVEWESNGQPENNYKTTPPVLDSDGSFFLYSKLTVDKSRWQQGNVFSCSVMHEALHNHYTQKSLSLSPGGGGSGGGGSGGGGSGGGGSGGGGSGGGGSDKTHTCPPCPAPELLGGPSVFLFPPKPKDTLMISRTPEVTCVVVDVSHEDPEVKFNWYVDGVEVHNAKTKPCEEQYGSTYRCVSVLTVLHQDWLNGKEYKCKVSNKALPAPIEKTISKAKGQPREPQVYTLPPSREEMTKNQVSLTCLVKGFYPSDIAVEWESNGQPENNYKTTPPVLDSDGSFFLYSKLTVDKSRWQQGNVFSCSVMHEALHNHYTQKSLSLSPGK

SEQ ID NO: 1256 - protein, 984 aa, Artificial Sequence
  Synthetic peptide
QAQLVESGGGVVQPGRSLRLSCAASGFTFSYYGMHWVRQAPGKCLEWVAVIWYDASNKYYADAVKGRFTISRDNSKNTLYLQMNSLRAEDTAVYYCARDREMGSRGDFDYWGQGTLVTVSSGGGGSGGGGSGGGGSDIQMTQSPSSLSASVGDRVTITCRASQGINNYLAWFQQKPGKAPKSLIYAVSILQSGVPSKFSGSGSGTDFTLTISNLQPEDFATYYCQQYNFYPFSFGCGTKVDIKSGGGGSEVQLVESGGGLVQPGGSLKLSCAASGFTFNKYAMNWVRQAPGKGLEWVARIRSKYNNYATYYADSVKDRFTISRDDSKNTAYLQMNNLKTEDTAVYYCVRHGNFGNSYISYWAYWGQGTLVTVSSGGGGSGGGGSGGGGSQTVVTQEPSLTVSPGGTVTLTCGSSTGAVTSGNYPNWVQQKPGQAPRGLIGGTKFLAPGTPARFSGSLLGGKAALTLSGVQPEDEAEYYCVLWYSNRWVFGGGTKLTVLGGGGDKTHTCPPCPAPELLGGPSVFLFPPKPKDTLMISRTPEVTCVVVDVSHEDPEVKFNWYVDGVEVHNAKTKPCEEQYGSTYRCVSVLTVLHQDWLNGKEYKCKVSNKALPAPIEKTISKAKGQPREPQVYTLPPSREEMTKNQVSLTCLVKGFYPSDIAVEWESNGQPENNYKTTPPVLDSDGSFFLYSKLTVDKSRWQQGNVFSCSVMHEALHNHYTQKSLSLSPGGGGSGGGGSGGGGSGGGGSGGGGSGGGGSDKTHTCPPCPAPELLGGPSVFLFPPKPKDTLMISRTPEVTCVVVDVSHEDPEVKFNWYVDGVEVHNAKTKPCEEQYGSTYRCVSVLTVLHQDWLNGKEYKCKVSNKALPAPIEKTISKAKGQPREPQVYTLPPSREEMTKNQVSLTCLVKGFYPSDIAVEWESNGQPENNYKTTPPVLDSDGSFFLYSKLTVDKSRWQQGNVFSCSVMHEALHNHYTQKSLSLSPGK

SEQ ID NO: 1257 - protein, 984 aa, Artificial Sequence
  Synthetic peptide
QAQLVESGGGVVQPGRSLRLSCAASGFTFSYYGMHWVRQAPGKGLEWVAVIWYDASNKYYADAVKGRFTISRDNSKNTLYLQMNSLRAEDTAVYYCARDREMGSRGDFDYWGQGTLVTVSSGGGGSGGGGSGGGGSDIQMTQSPSSLSASVGDRVTITCRASQGINNYLAWFQQKPGKAPKSLIYAVSILQSGVPSKFSGSGSGTDFTLTISNLQPEDFATYYCQQYNFYPFSFGQGTKVDIKSGGGGSEVQLVESGGGLVQPGGSLKLSCAASGFTFNKYAMNWVRQAPGKGLEWVARIRSKYNNYATYYADSVKDRFTISRDDSKNTAYLQMNNLKTEDTAVYYCVRHGNFGNSYISYWAYWGQGTLVTVSSGGGGSGGGGSGGGGSQTVVTQEPSLTVSPGGTVTLTCGSSTGAVTSGNYPNWVQQKPGQAPRGLIGGTKFLAPGTPARFSGSLLGGKAALTLSGVQPEDEAEYYCVLWYSNRWVFGGGTKLTVLGGGGDKTHTCPPCPAPELLGGPSVFLFPPKPKDTLMISRTPEVTCVVVDVSHEDPEVKFNWYVDGVEVHNAKTKPCEEQYGSTYRCVSVLTVLHQDWLNGKEYKCKVSNKALPAPIEKTISKAKGQPREPQVYTLPPSREEMTKNQVSLTCLVKGFYPSDIAVEWESNGQPENNYKTTPPVLDSDGSFFLYSKLTVDKSRWQQGNVFSCSVMHEALHNHYTQKSLSLSPGGGGSGGGGSGGGGSGGGGSGGGGSGGGGSDKTHTCPPCPAPELLGGPSVFLFPPKPKDTLMISRTPEVTCVVVDVSHEDPEVKFNWYVDGVEVHNAKTKPCEEQYGSTYRCVSVLTVLHQDWLNGKEYKCKVSNKALPAPIEKTISKAKGQPREPQVYTLPPSREEMTKNQVSLTCLVKGFYPSDIAVEWESNGQPENNYKTTPPVLDSDGSFFLYSKLTVDKSRWQQGNVFSCSVMHEALHNHYTQKSLSLSPGK

SEQ ID NO: 1258 - protein, 981 aa, Artificial Sequence
  Synthetic peptide
QVQLQQWGAGLLKPSETLSLTCAVYGGSFSGFYWSWIRQPPGKCLEWIGEIYHSGHATNNPSLKSRVTISLDTSKNQFSLKLNSVTAADTAVYYCARGGNSGYIFDYWGQGTLVTVSSGGGGSGGGGSGGGGSDVQMTQSPSSLSASVGDRVTITCRTSQYIGRYLNWYQQKPGKAPKVLIYGASTLQQGVPSRFSGSGSGTDFTLTITSLQPEDFASYYCQQTYSTPRTFGCGTKVEIKSGGGGSEVQLVESGGGLVQPGGSLKLSCAASGFTFNKYAMNWVRQAPGKGLEWVARIRSKYNNYATYYADSVKDRFTISRDDSKNTAYLQMNNLKTEDTAVYYCVRHGNFGNSYISYWAYWGQGTLVTVSSGGGGSGGGGSGGGGSQTVVTQEPSLTVSPGGTVTLTCGSSTGAVTSGNYPNWVQQKPGQAPRGLIGGTKFLAPGTPARFSGSLLGGKAALTLSGVQPEDEAEYYCVLWYSNRWVFGGGTKLTVLGGGGDKTHTCPPCPAPELLGGPSVFLFPPKPKDTLMISRTPEVTCVVVDVSHEDPEVKFNWYVDGVEVHNAKTKPCEEQYGSTYRCVSVLTVLHQDWLNGKEYKCKVSNKALPAPIEKTISKAKGQPREPQVYTLPPSREEMTKNQVSLTCLVKGFYPSDIAVEWESNGQPENNYKTTPPVLDSDGSFFLYSKLTVDKSRWQQGNVFSCSVMHEALHNHYTQKSLSLSPGGGGSGGGGSGGGGSGGGGSGGGGSGGGGSDKTHTCPPCPAPELLGGPSVFLFPPKPKDTLMISRTPEVTCVVVDVSHEDPEVKFNWYVDGVEVHNAKTKPCEEQYGSTYRCVSVLTVLHQDWLNGKEYKCKVSNKALPAPIEKTISKAKGQPREPQVYTLPPSREEMTKNQVSLTCLVKGFYPSDIAVEWESNGQPENNYKTTPPVLDSDGSFFLYSKLTVDKSRWQQGNVFSCSVMHEALHNHYTQKSLSLSPGK

SEQ ID NO: 1259 - protein, 981 aa, Artificial Sequence
  Synthetic peptide
QVQLQQWGAGLLKPSETLSLTCAVYGGSFSGFYWSWIRQPPGKGLEWIGEIYHSGHATNNPSLKSRVTISLDTSKNQFSLKLNSVTAADTAVYYCARGGNSGYIFDYWGQGTLVTVSSGGGGSGGGGSGGGGSDVQMTQSPSSLSASVGDRVTITCRTSQYIGRYLNWYQQKPGKAPKVLIYGASTLQQGVPSRFSGSGSGTDFTLTITSLQPEDFASYYCQQTYSTPRTFGQGTKVEIKSGGGGSEVQLVESGGGLVQPGGSLKLSCAASGFTFNKYAMNWVRQAPGKGLEWVARIRSKYNNYATYYADSVKDRFTISRDDSKNTAYLQMNNLKTEDTAVYYCVRHGNFGNSYISYWAYWGQGTLVTVSSGGGGSGGGGSGGGGSQTVVTQEPSLTVSPGGTVTLTCGSSTGAVTSGNYPNWVQQKPGQAPRGLIGGTKFLAPGTPARFSGSLLGGKAALTLSGVQPEDEAEYYCVLWYSNRWVFGGGTKLTVLGGGGDKTHTCPPCPAPELLGGPSVFLFPPKPKDTLMISRTPEVTCVVVDVSHEDPEVKFNWYVDGVEVHNAKTKPCEEQYGSTYRCVSVLTVLHQDWLNGKEYKCKVSNKALPAPIEKTISKAKGQPREPQVYTLPPSREEMTKNQVSLTCLVKGFYPSDIAVEWESNGQPENNYKTTPPVLDSDGSFFLYSKLTVDKSRWQQGNVFSCSVMHEALHNHYTQKSLSLSPGGGGSGGGGSGGGGSGGGGSGGGGSGGGGSDKTHTCPPCPAPELLGGPSVFLFPPKPKDTLMISRTPEVTCVVVDVSHEDPEVKFNWYVDGVEVHNAKTKPCEEQYGSTYRCVSVLTVLHQDWLNGKEYKCKVSNKALPAPIEKTISKAKGQPREPQVYTLPPSREEMTKNQVSLTCLVKGFYPSDIAVEWESNGQPENNYKTTPPVLDSDGSFFLYSKLTVDKSRWQQGNVFSCSVMHEALHNHYTQKSLSLSPGK

SEQ ID NO: 1260 - protein, 987 aa, Artificial Sequence
  Synthetic peptide
QVQLVESGGGVVQPGRSLRLSCAASGFTFSTYGMHWVRQAPGKCLEWVAVIWYEGSNKYYGESVKGRFTISRDNSKNTLYLQMNSLRAEDTAVYYCARDNSHYYYGMDVWGQGTTVTVSSGGGGSGGGGSGGGGSQSVLTQPPSVSGAPGQRVTISCTGSSSNIGAGYDVNWYQQFPGTAPKLLIYVNNNRPSGVPDRFSGSTSGTSASLAITGLQAEDEADYYCQSYDTSLSASVFGCGTRLTVLSGGGGSEVQLVESGGGLVQPGGSLKLSCAASGFTFNKYAMNWVRQAPGKGLEWVARIRSKYNNYATYYADSVKDRFTISRDDSKNTAYLQMNNLKTEDTAVYYCVRHGNFGNSYISYWAYWGQGTLVTVSSGGGGSGGGGSGGGGSQTVVTQEPSLTVSPGGTVTLTCGSSTGAVTSGNYPNWVQQKPGQAPRGLIGGTKFLAPGTPARFSGSLLGGKAALTLSGVQPEDEAEYYCVLWYSNRWVFGGGTKLTVLGGGGDKTHTCPPCPAPELLGGPSVFLFPPKPKDTLMISRTPEVTCVVVDVSHEDPEVKFNWYVDGVEVHNAKTKPCEEQYGSTYRCVSVLTVLHQDWLNGKEYKCKVSNKALPAPIEKTISKAKGQPREPQVYTLPPSREEMTKNQVSLTCLVKGFYPSDIAVEWESNGQPENNYKTTPPVLDSDGSFFLYSKLTVDKSRWQQGNVFSCSVMHEALHNHYTQKSLSLSPGGGGSGGGGSGGGGSGGGGSGGGGSGGGGSDKTHTCPPCPAPELLGGPSVFLFPPKPKDTLMISRTPEVTCVVVDVSHEDPEVKFNWYVDGVEVHNAKTKPCEEQYGSTYRCVSVLTVLHQDWLNGKEYKCKVSNKALPAPIEKTISKAKGQPREPQVYTLPPSREEMTKNQVSLTCLVKGFYPSDIAVEWESNGQPENNYKTTPPVLDSDGSFFLYSKLTVDKSRWQQGNVFSCSVMHEALHNHYTQKSLSLSPGK

SEQ ID NO: 1261 - protein, 987 aa, Artificial Sequence
  Synthetic peptide
QVQLVESGGGVVQPGRSLRLSCAASGFTFSTYGMHWVRQAPGKGLEWVAVIWYEGSNKYYGESVKGRFTISRDNSKNTLYLQMNSLRAEDTAVYYCARDNSHYYYGMDVWGQGTTVTVSSGGGGSGGGGSGGGGSQSVLTQPPSVSGAPGQRVTISCTGSSSNIGAGYDVNWYQQFPGTAPKLLIYVNNNRPSGVPDRFSGSTSGTSASLAITGLQAEDEADYYCQSYDTSLSASVFGGGTRLTVLSGGGGSEVQLVESGGGLVQPGGSLKLSCAASGFTFNKYAMNWVRQAPGKGLEWVARIRSKYNNYATYYADSVKDRFTISRDDSKNTAYLQMNNLKTEDTAVYYCVRHGNFGNSYISYWAYWGQGTLVTVSSGGGGSGGGGSGGGGSQTVVTQEPSLTVSPGGTVTLTCGSSTGAVTSGNYPNWVQQKPGQAPRGLIGGTKFLAPGTPARFSGSLLGGKAALTLSGVQPEDEAEYYCVLWYSNRWVFGGGTKLTVLGGGGDKTHTCPPCPAPELLGGPSVFLFPPKPKDTLMISRTPEVTCVVVDVSHEDPEVKFNWYVDGVEVHNAKTKPCEEQYGSTYRCVSVLTVLHQDWLNGKEYKCKVSNKALPAPIEKTISKAKGQPREPQVYTLPPSREEMTKNQVSLTCLVKGFYPSDIAVEWESNGQPENNYKTTPPVLDSDGSFFLYSKLTVDKSRWQQGNVFSCSVMHEALHNHYTQKSLSLSPGGGGSGGGGSGGGGSGGGGSGGGGSGGGGSDKTHTCPPCPAPELLGGPSVFLFPPKPKDTLMISRTPEVTCVVVDVSHEDPEVKFNWYVDGVEVHNAKTKPCEEQYGSTYRCVSVLTVLHQDWLNGKEYKCKVSNKALPAPIEKTISKAKGQPREPQVYTLPPSREEMTKNQVSLTCLVKGFYPSDIAVEWESNGQPENNYKTTPPVLDSDGSFFLYSKLTVDKSRWQQGNVFSCSVMHEALHNHYTQKSLSLSPGK

SEQ ID NO: 1262 - protein, 987 aa, Artificial Sequence
  Synthetic peptide
QVQLVESGGGVVQPGRSLRLSCAASGFTFSTYGMHWVRQAPGKCLEWVAVIWYEGSNKYYGESVKGRFTISRDNSKNTLYLQMNSLRAEDTAVYYCARDNSHYYYGMDVWGQGTLVTVSSGGGGSGGGGSGGGGSQSVLTQPPSVSGAPGQRVTISCTGSSSNIGAGYDVNWYQQLPGTAPKLLIYVNNNRPSGVPDRFSGSKSGTSASLAITGLQAEDEADYYCQSYETSLSASVFGCGTRLTVLSGGGGSEVQLVESGGGLVQPGGSLKLSCAASGFTFNKYAMNWVRQAPGKGLEWVARIRSKYNNYATYYADSVKDRFTISRDDSKNTAYLQMNNLKTEDTAVYYCVRHGNFGNSYISYWAYWGQGTLVTVSSGGGGSGGGGSGGGGSQTVVTQEPSLTVSPGGTVTLTCGSSTGAVTSGNYPNWVQQKPGQAPRGLIGGTKFLAPGTPARFSGSLLGGKAALTLSGVQPEDEAEYYCVLWYSNRWVFGGGTKLTVLGGGGDKTHTCPPCPAPELLGGPSVFLFPPKPKDTLMISRTPEVTCVVVDVSHEDPEVKFNWYVDGVEVHNAKTKPCEEQYGSTYRCVSVLTVLHQDWLNGKEYKCKVSNKALPAPIEKTISKAKGQPREPQVYTLPPSREEMTKNQVSLTCLVKGFYPSDIAVEWESNGQPENNYKTTPPVLDSDGSFFLYSKLTVDKSRWQQGNVFSCSVMHEALHNHYTQKSLSLSPGGGGSGGGGSGGGGSGGGGSGGGGSGGGGSDKTHTCPPCPAPELLGGPSVFLFPPKPKDTLMISRTPEVTCVVVDVSHEDPEVKFNWYVDGVEVHNAKTKPCEEQYGSTYRCVSVLTVLHQDWLNGKEYKCKVSNKALPAPIEKTISKAKGQPREPQVYTLPPSREEMTKNQVSLTCLVKGFYPSDIAVEWESNGQPENNYKTTPPVLDSDGSFFLYSKLTVDKSRWQQGNVFSCSVMHEALHNHYTQKSLSLSPGK

SEQ ID NO: 1263 - protein, 987 aa, Artificial Sequence
  Synthetic peptide
QVQLVESGGGVVQPGRSLRLSCAASGFTFSTYGMHWVRQAPGKGLEWVAVIWYEGSNKYYGESVKGRFTISRDNSKNTLYLQMNSLRAEDTAVYYCARDNSHYYYGMDVWGQGTLVTVSSGGGGSGGGGSGGGGSQSVLTQPPSVSGAPGQRVTISCTGSSSNIGAGYDVNWYQQLPGTAPKLLIYVNNNRPSGVPDRFSGSKSGTSASLAITGLQAEDEADYYCQSYETSLSASVFGGGTRLTVLSGGGGSEVQLVESGGGLVQPGGSLKLSCAASGFTFNKYAMNWVRQAPGKGLEWVARIRSKYNNYATYYADSVKDRFTISRDDSKNTAYLQMNNLKTEDTAVYYCVRHGNFGNSYISYWAYWGQGTLVTVSSGGGGSGGGGSGGGGSQTVVTQEPSLTVSPGGTVTLTCGSSTGAVTSGNYPNWVQQKPGQAPRGLIGGTKFLAPGTPARFSGSLLGGKAALTLSGVQPEDEAEYYCVLWYSNRWVFGGGTKLTVLGGGGDKTHTCPPCPAPELLGGPSVFLFPPKPKDTLMISRTPEVTCVVVDVSHEDPEVKFNWYVDGVEVHNAKTKPCEEQYGSTYRCVSVLTVLHQDWLNGKEYKCKVSNKALPAPIEKTISKAKGQPREPQVYTLPPSREEMTKNQVSLTCLVKGFYPSDIAVEWESNGQPENNYKTTPPVLDSDGSFFLYSKLTVDKSRWQQGNVFSCSVMHEALHNHYTQKSLSLSPGGGGSGGGGSGGGGSGGGGSGGGGSGGGGSDKTHTCPPCPAPELLGGPSVFLFPPKPKDTLMISRTPEVTCVVVDVSHEDPEVKFNWYVDGVEVHNAKTKPCEEQYGSTYRCVSVLTVLHQDWLNGKEYKCKVSNKALPAPIEKTISKAKGQPREPQVYTLPPSREEMTKNQVSLTCLVKGFYPSDIAVEWESNGQPENNYKTTPPVLDSDGSFFLYSKLTVDKSRWQQGNVFSCSVMHEALHNHYTQKSLSLSPGK

SEQ ID NO: 1264 - protein, 983 aa, Artificial Sequence
  Synthetic peptide
QMQLQESGPGLVKPSETLSLTCTVSGGSIESGVYYWSWIRQPPGKCLEWIGYIYYSGSTSYNPSLKSRLTMSVDTSKNQFSLKLSSVTAADTAVYYCARSGYSYALFDYWGQGTLVTVSSGGGGSGGGGSGGGGSDIQMTQSPSSLSASLGDRVTITCRASQSVDRYFNWYQQKPGKAPKVLIFAASSLQSGVPSRFSGSGSGTDFTLTISSLQPEDFATYYCQQSYSTPWTFGCGTKVEVKSGGGGSEVQLVESGGGLVQPGGSLKLSCAASGFTFNKYAMNWVRQAPGKGLEWVARIRSKYNNYATYYADSVKDRFTISRDDSKNTAYLQMNNLKTEDTAVYYCVRHGNFGNSYISYWAYWGQGTLVTVSSGGGGSGGGGSGGGGSQTVVTQEPSLTVSPGGTVTLTCGSSTGAVTSGNYPNWVQQKPGQAPRGLIGGTKFLAPGTPARFSGSLLGGKAALTLSGVQPEDEAEYYCVLWYSNRWVFGGGTKLTVLGGGGDKTHTCPPCPAPELLGGPSVFLFPPKPKDTLMISRTPEVTCVVVDVSHEDPEVKFNWYVDGVEVHNAKTKPCEEQYGSTYRCVSVLTVLHQDWLNGKEYKCKVSNKALPAPIEKTISKAKGQPREPQVYTLPPSREEMTKNQVSLTCLVKGFYPSDIAVEWESNGQPENNYKTTPPVLDSDGSFFLYSKLTVDKSRWQQGNVFSCSVMHEALHNHYTQKSLSLSPGGGGSGGGGSGGGGSGGGGSGGGGSGGGGSDKTHTCPPCPAPELLGGPSVFLFPPKPKDTLMISRTPEVTCVVVDVSHEDPEVKFNWYVDGVEVHNAKTKPCEEQYGSTYRCVSVLTVLHQDWLNGKEYKCKVSNKALPAPIEKTISKAKGQPREPQVYTLPPSREEMTKNQVSLTCLVKGFYPSDIAVEWESNGQPENNYKTTPPVLDSDGSFFLYSKLTVDKSRWQQGNVFSCSVMHEALHNHYTQKSLSLSPGK

SEQ ID NO: 1265 - protein, 983 aa, Artificial Sequence
  Synthetic peptide
QMQLQESGPGLVKPSETLSLTCTVSGGSIESGVYYWSWIRQPPGKGLEWIGYIYYSGSTSYNPSLKSRLTMSVDTSKNQFSLKLSSVTAADTAVYYCARSGYSYALFDYWGQGTLVTVSSGGGGSGGGGSGGGGSDIQMTQSPSSLSASLGDRVTITCRASQSVDRYFNWYQQKPGKAPKVLIFAASSLQSGVPSRFSGSGSGTDFTLTISSLQPEDFATYYCQQSYSTPWTFGQGTKVEVKSGGGGSEVQLVESGGGLVQPGGSLKLSCAASGFTFNKYAMNWVRQAPGKGLEWVARIRSKYNNYATYYADSVKDRFTISRDDSKNTAYLQMNNLKTEDTAVYYCVRHGNFGNSYISYWAYWGQGTLVTVSSGGGGSGGGGSGGGGSQTVVTQEPSLTVSPGGTVTLTCGSSTGAVTSGNYPNWVQQKPGQAPRGLIGGTKFLAPGTPARFSGSLLGGKAALTLSGVQPEDEAEYYCVLWYSNRWVFGGGTKLTVLGGGGDKTHTCPPCPAPELLGGPSVFLFPPKPKDTLMISRTPEVTCVVVDVSHEDPEVKFNWYVDGVEVHNAKTKPCEEQYGSTYRCVSVLTVLHQDWLNGKEYKCKVSNKALPAPIEKTISKAKGQPREPQVYTLPPSREEMTKNQVSLTCLVKGFYPSDIAVEWESNGQPENNYKTTPPVLDSDGSFFLYSKLTVDKSRWQQGNVFSCSVMHEALHNHYTQKSLSLSPGGGGSGGGGSGGGGSGGGGSGGGGSGGGGSDKTHTCPPCPAPELLGGPSVFLFPPKPKDTLMISRTPEVTCVVVDVSHEDPEVKFNWYVDGVEVHNAKTKPCEEQYGSTYRCVSVLTVLHQDWLNGKEYKCKVSNKALPAPIEKTISKAKGQPREPQVYTLPPSREEMTKNQVSLTCLVKGFYPSDIAVEWESNGQPENNYKTTPPVLDSDGSFFLYSKLTVDKSRWQQGNVFSCSVMHEALHNHYTQKSLSLSPGK

SEQ ID NO: 1266 - protein, 983 aa, Artificial Sequence
  Synthetic peptide
QVQLQESGPGLVKPSQTLSLTCTVSGDSIISGGYYWSWIRQPPGKCLEWIGYIFYSGSTDYNPSLKSRVTISVDTSKNQFSLKLSSVTAADTAVYYCARSGYSYALFDAWGQGTLVTVSSGGGGSGGGGSGGGGSDIQMTQSPSSLSASVGDRVTISCRASQFIGRYFNWYQQKPGKAPKVLIYAESSLQSGVPSRFSGSGSGTEFTLTISSLQPEDFATYYCQQSYSTPWTFGCGTKVEIKSGGGGSEVQLVESGGGLVQPGGSLKLSCAASGFTFNKYAMNWVRQAPGKGLEWVARIRSKYNNYATYYADSVKDRFTISRDDSKNTAYLQMNNLKTEDTAVYYCVRHGNFGNSYISYWAYWGQGTLVTVSSGGGGSGGGGSGGGGSQTVVTQEPSLTVSPGGTVTLTCGSSTGAVTSGNYPNWVQQKPGQAPRGLIGGTKFLAPGTPARFSGSLLGGKAALTLSGVQPEDEAEYYCVLWYSNRWVFGGGTKLTVLGGGGDKTHTCPPCPAPELLGGPSVFLFPPKPKDTLMISRTPEVTCVVVDVSHEDPEVKFNWYVDGVEVHNAKTKPCEEQYGSTYRCVSVLTVLHQDWLNGKEYKCKVSNKALPAPIEKTISKAKGQPREPQVYTLPPSREEMTKNQVSLTCLVKGFYPSDIAVEWESNGQPENNYKTTPPVLDSDGSFFLYSKLTVDKSRWQQGNVFSCSVMHEALHNHYTQKSLSLSPGGGGSGGGGSGGGGSGGGGSGGGGSGGGGSDKTHTCPPCPAPELLGGPSVFLFPPKPKDTLMISRTPEVTCVVVDVSHEDPEVKFNWYVDGVEVHNAKTKPCEEQYGSTYRCVSVLTVLHQDWLNGKEYKCKVSNKALPAPIEKTISKAKGQPREPQVYTLPPSREEMTKNQVSLTCLVKGFYPSDIAVEWESNGQPENNYKTTPPVLDSDGSFFLYSKLTVDKSRWQQGNVFSCSVMHEALHNHYTQKSLSLSPGK

SEQ ID NO: 1267 - protein, 983 aa, Artificial Sequence
  Synthetic peptide
QVQLQESGPGLVKPSQTLSLTCTVSGDSIISGGYYWSWIRQPPGKGLEWIGYIFYSGSTDYNPSLKSRVTISVDTSKNQFSLKLSSVTAADTAVYYCARSGYSYALFDAWGQGTLVTVSSGGGGSGGGGSGGGGSDIQMTQSPSSLSASVGDRVTISCRASQFIGRYFNWYQQKPGKAPKVLIYAESSLQSGVPSRFSGSGSGTEFTLTISSLQPEDFATYYCQQSYSTPWTFGQGTKVEIKSGGGGSEVQLVESGGGLVQPGGSLKLSCAASGFTFNKYAMNWVRQAPGKGLEWVARIRSKYNNYATYYADSVKDRFTISRDDSKNTAYLQMNNLKTEDTAVYYCVRHGNFGNSYISYWAYWGQGTLVTVSSGGGGSGGGGSGGGGSQTVVTQEPSLTVSPGGTVTLTCGSSTGAVTSGNYPNWVQQKPGQAPRGLIGGTKFLAPGTPARFSGSLLGGKAALTLSGVQPEDEAEYYCVLWYSNRWVFGGGTKLTVLGGGGDKTHTCPPCPAPELLGGPSVFLFPPKPKDTLMISRTPEVTCVVVDVSHEDPEVKFNWYVDGVEVHNAKTKPCEEQYGSTYRCVSVLTVLHQDWLNGKEYKCKVSNKALPAPIEKTISKAKGQPREPQVYTLPPSREEMTKNQVSLTCLVKGFYPSDIAVEWESNGQPENNYKTTPPVLDSDGSFFLYSKLTVDKSRWQQGNVFSCSVMHEALHNHYTQKSLSLSPGGGGSGGGGSGGGGSGGGGSGGGGSGGGGSDKTHTCPPCPAPELLGGPSVFLFPPKPKDTLMISRTPEVTCVVVDVSHEDPEVKFNWYVDGVEVHNAKTKPCEEQYGSTYRCVSVLTVLHQDWLNGKEYKCKVSNKALPAPIEKTISKAKGQPREPQVYTLPPSREEMTKNQVSLTCLVKGFYPSDIAVEWESNGQPENNYKTTPPVLDSDGSFFLYSKLTVDKSRWQQGNVFSCSVMHEALHNHYTQKSLSLSPGK

SEQ ID NO: 1268 - protein, 501 aa, Artificial Sequence
  Synthetic peptide
QVQLVQSGAEVKKPGSSVKVSCKASGYAFSYSWINWVRQAPGQGLEWMGRIFPGDGDTDYNGKFKGRVTITADKSTSTAYMELSSLRSEDTAVYYCARNVFDGYWLVYWGQGTLVTVSSGGGGSGGGGSGGGGSDIVMTQTPLSLPVTPGEPASISCRSSKSLLHSNGITYLYWYLQKPGQSPQLLIYQMSNLVSGVPDRFSGSGSGTDFTLKISRVEAEDVGVYYCAQNLELPYTFGGGTKVEIKSGGGGSEVQLVESGGGLVQPGGSLKLSCAASGFTFNKYAMNWVRQAPGKGLEWVARIRSKYNNYATYYADSVKDRFTISRDDSKNTAYLQMNNLKTEDTAVYYCVRHGNFGNSYISYWAYWGQGTLVTVSSGGGGSGGGGSGGGGSQTVVTQEPSLTVSPGGTVTLTCGSSTGAVTSGNYPNWVQQKPGQAPRGLIGGTKFLAPGTPARFSGSLLGGKAALTLSGVQPEDEAEYYCVLWYSNRWVFGGGTKLTVL

SEQ ID NO: 1269 - protein, 5 aa, Artificial Sequence
  Synthetic peptide
NYGMH

SEQ ID NO: 1270 - protein, 17 aa, Artificial Sequence
  Synthetic peptide
AIGWEGSNKYYAEPVKG

SEQ ID NO: 1271 - protein, 13 aa, Artificial Sequence
  Synthetic peptide
DRGTIFGYYGMDV

SEQ ID NO: 1272 - protein, 16 aa, Artificial Sequence
  Synthetic peptide
RSSQSLLHSNRFNYLD

SEQ ID NO: 1273 - protein, 7 aa, Artificial Sequence
  Synthetic peptide
LGSNRAS

SEQ ID NO: 1274 - protein, 9 aa, Artificial Sequence
  Synthetic peptide
MQALQTPLT

SEQ ID NO: 1275 - protein, 122 aa, Artificial Sequence
  Synthetic peptide
QVQLVESGGGVVQPGRSLRLSCEASGFIVSNYGMHWVRQAPGKCLEWVAAIGWEGSNKYYAEPVKGRFTISRDKSKNTLSLQMSSLRAEDTALYYCARDRGTIFGYYGMDVWGQGTTVTVSS

SEQ ID NO: 1276 - protein, 112 aa, Artificial Sequence
  Synthetic peptide
DIVMTQSPLSLPVTPGEPASISCRSSQSLLHSNRFNYLDWYLQKPGQSPQLLIYLGSNRASGVPDRFSGSGSGTDFTLKISRVEAEDVGVYYCMQALQTPLTFACGTKVEIK

SEQ ID NO: 1277 - protein, 249 aa, Artificial Sequence
  Synthetic peptide
DIVMTQSPLSLPVTPGEPASISCRSSQSLLHSNRFNYLDWYLQKPGQSPQLLIYLGSNRASGVPDRFSGSGSGTDFTLKISRVEAEDVGVYYCMQALQTPLTFACGTKVEIKGGGGSGGGGSGGGGSQVQLVESGGGVVQPGRSLRLSCEASGFIVSNYGMHWVRQAPGKCLEWVAAIGWEGSNKYYAEPVKGRFTISRDKSKNTLSLQMSSLRAEDTALYYCARDRGTIFGYYGMDVWGQGTTVTVSS

SEQ ID NO: 1278 - protein, 503 aa, Artificial Sequence
  Synthetic peptide
DIVMTQSPLSLPVTPGEPASISCRSSQSLLHSNRFNYLDWYLQKPGQSPQLLIYLGSNRASGVPDRFSGSGSGTDFTLKISRVEAEDVGVYYCMQALQTPLTFACGTKVEIKGGGGSGGGGSGGGGSQVQLVESGGGVVQPGRSLRLSCEASGFIVSNYGMHWVRQAPGKCLEWVAAIGWEGSNKYYAEPVKGRFTISRDKSKNTLSLQMSSLRAEDTALYYCARDRGTIFGYYGMDVWGQGTTVTVSSGGGGSEVQLVESGGGLVQPGGSLKLSCAASGFTFNKYAMNWVRQAPGKGLEWVARIRSKYNNYATYYADSVKDRFTISRDDSKNTAYLQMNNLKTEDTAVYYCVRHGNFGNSYISYWAYWGQGTLVTVSSGGGGSGGGGSGGGGSQTVVTQEPSLTVSPGGTVTLTCGSSTGAVTSGNYPNWVQQKPGQAPRGLIGGTKFLAPGTPARFSGSLLGGKAALTLSGVQPEDEAEYYCVLWYSNRWVFGGGTKLTVL

SEQ ID NO: 1279 - protein, 991 aa, Artificial Sequence
  Synthetic peptide
DIVMTQSPLSLPVTPGEPASISCRSSQSLLHSNRFNYLDWYLQKPGQSPQLLIYLGSNRASGVPDRFSGSGSGTDFTLKISRVEAEDVGVYYCMQALQTPLTFACGTKVEIKGGGGSGGGGSGGGGSQVQLVESGGGVVQPGRSLRLSCEASGFIVSNYGMHWVRQAPGKCLEWVAAIGWEGSNKYYAEPVKGRFTISRDKSKNTLSLQMSSLRAEDTALYYCARDRGTIFGYYGMDVWGQGTTVTVSSGGGGSEVQLVESGGGLVQPGGSLKLSCAASGFTFNKYAMNWVRQAPGKGLEWVARIRSKYNNYATYYADSVKDRFTISRDDSKNTAYLQMNNLKTEDTAVYYCVRHGNFGNSYISYWAYWGQGTLVTVSSGGGGSGGGGSGGGGSQTVVTQEPSLTVSPGGTVTLTCGSSTGAVTSGNYPNWVQQKPGQAPRGLIGGTKFLAPGTPARFSGSLLGGKAALTLSGVQPEDEAEYYCVLWYSNRWVFGGGTKLTVLGGGGDKTHTCPPCPAPELLGGPSVFLFPPKPKDTLMISRTPEVTCVVVDVSHEDPEVKFNWYVDGVEVHNAKTKPCEEQYGSTYRCVSVLTVLHQDWLNGKEYKCKVSNKALPAPIEKTISKAKGQPREPQVYTLPPSREEMTKNQVSLTCLVKGFYPSDIAVEWESNGQPENNYKTTPPVLDSDGSFFLYSKLTVDKSRWQQGNVFSCSVMHEALHNHYTQKSLSLSPGKGGGGSGGGGSGGGGSGGGGSGGGGSGGGGSDKTHTCPPCPAPELLGGPSVFLFPPKPKDTLMISRTPEVTCVVVDVSHEDPEVKFNWYVDGVEVHNAKTKPCEEQYGSTYRCVSVLTVLHQDWLNGKEYKCKVSNKALPAPIEKTISKAKGQPREPQVYTLPPSREEMTKNQVSLTCLVKGFYPSDIAVEWESNGQPENNYKTTPPVLDSDGSFFLYSKLTVDKSRWQQGNVFSCSVMHEALHNHYTQKSLSLSPGK

SEQ ID NO: 1280 - protein, 989 aa, Artificial Sequence
  Synthetic peptide
DIVMTQSPLSLPVTPGEPASISCRSSQSLLHSNRFNYLDWYLQKPGQSPQLLIYLGSNRASGVPDRFSGSGSGTDFTLKISRVEAEDVGVYYCMQALQTPLTFACGTKVEIKGGGGSGGGGSGGGGSQVQLVESGGGVVQPGRSLRLSCEASGFIVSNYGMHWVRQAPGKCLEWVAAIGWEGSNKYYAEPVKGRFTISRDKSKNTLSLQMSSLRAEDTALYYCARDRGTIFGYYGMDVWGQGTTVTVSSGGGGSEVQLVESGGGLVQPGGSLKLSCAASGFTFNKYAMNWVRQAPGKGLEWVARIRSKYNNYATYYADSVKDRFTISRDDSKNTAYLQMNNLKTEDTAVYYCVRHGNFGNSYISYWAYWGQGTLVTVSSGGGGSGGGGSGGGGSQTVVTQEPSLTVSPGGTVTLTCGSSTGAVTSGNYPNWVQQKPGQAPRGLIGGTKFLAPGTPARFSGSLLGGKAALTLSGVQPEDEAEYYCVLWYSNRWVFGGGTKLTVLGGGGDKTHTCPPCPAPELLGGPSVFLFPPKPKDTLMISRTPEVTCVVVDVSHEDPEVKFNWYVDGVEVHNAKTKPCEEQYGSTYRCVSVLTVLHQDWLNGKEYKCKVSNKALPAPIEKTISKAKGQPREPQVYTLPPSREEMTKNQVSLTCLVKGFYPSDIAVEWESNGQPENNYKTTPPVLDSDGSFFLYSKLTVDKSRWQQGNVFSCSVMHEALHNHYTQKSLSLSPGGGGSGGGGSGGGGSGGGGSGGGGSGGGGSDKTHTCPPCPAPELLGGPSVFLFPPKPKDTLMISRTPEVTCVVVDVSHEDPEVKFNWYVDGVEVHNAKTKPCEEQYGSTYRCVSVLTVLHQDWLNGKEYKCKVSNKALPAPIEKTISKAKGQPREPQVYTLPPSREEMTKNQVSLTCLVKGFYPSDIAVEWESNGQPENNYKTTPPVLDSDGSFFLYSKLTVDKSRWQQGNVFSCSVMHEALHNHYTQKSLSLSPGK

SEQ ID NO: 1281 - protein, 5 aa, Artificial Sequence
  Synthetic peptide
SYGIH

SEQ ID NO: 1282 - protein, 17 aa, Artificial Sequence
  Synthetic peptide
LTSYEGGNKYYAESVKG

SEQ ID NO: 1283 - protein, 13 aa, Artificial Sequence
  Synthetic peptide
DRGTIFGDYGMDV

SEQ ID NO: 1284 - protein, 16 aa, Artificial Sequence
  Synthetic peptide
RSSQSLLHKNAFNYLD

SEQ ID NO: 1285 - protein, 7 aa, Artificial Sequence
  Synthetic peptide
LGSNRAS

SEQ ID NO: 1286 - protein, 9 aa, Artificial Sequence
  Synthetic peptide
MQALQTPFT

SEQ ID NO: 1287 - protein, 122 aa, Artificial Sequence
  Synthetic peptide
QVQLVESGGGVVQPGRSLRLSCAASGFTFSSYGIHWVRQAPGKCLEWVALTSYEGGNKYYAESVKGRFTISRDNSKNTLYLQMNSLRAEDTAVYYCAKDRGTIFGDYGMDVWGQGTTVTVSS

SEQ ID NO: 1288 - protein, 112 aa, Artificial Sequence
  Synthetic peptide
DIVMTQSPLSLPVTPGEPASISCRSSQSLLHKNAFNYLDWYLQKPGQSPQLLIYLGSNRASGVPDRFSGSGSGTDFTLKISRVEAEDVGVYYCMQALQTPFTFGCGTKVEIK

SEQ ID NO: 1289 - protein, 249 aa, Artificial Sequence
  Synthetic peptide
DIVMTQSPLSLPVTPGEPASISCRSSQSLLHKNAFNYLDWYLQKPGQSPQLLIYLGSNRASGVPDRFSGSGSGTDFTLKISRVEAEDVGVYYCMQALQTPFTFGCGTKVEIKGGGGSGGGGSGGGGSQVQLVESGGGVVQPGRSLRLSCAASGFTFSSYGIHWVRQAPGKCLEWVALTSYEGGNKYYAESVKGRFTISRDNSKNTLYLQMNSLRAEDTAVYYCAKDRGTIFGDYGMDVWGQGTTVTVSS

SEQ ID NO: 1290 - protein, 503 aa, Artificial Sequence
  Synthetic peptide
DIVMTQSPLSLPVTPGEPASISCRSSQSLLHKNAFNYLDWYLQKPGQSPQLLIYLGSNRASGVPDRFSGSGSGTDFTLKISRVEAEDVGVYYCMQALQTPFTFGCGTKVEIKGGGGSGGGGSGGGGSQVQLVESGGGVVQPGRSLRLSCAASGFTFSSYGIHWVRQAPGKCLEWVALTSYEGGNKYYAESVKGRFTISRDNSKNTLYLQMNSLRAEDTAVYYCAKDRGTIFGDYGMDVWGQGTTVTVSSGGGGSEVQLVESGGGLVQPGGSLKLSCAASGFTFNKYAMNWVRQAPGKGLEWVARIRSKYNNYATYYADSVKDRFTISRDDSKNTAYLQMNNLKTEDTAVYYCVRHGNFGNSYISYWAYWGQGTLVTVSSGGGGSGGGGSGGGGSQTVVTQEPSLTVSPGGTVTLTCGSSTGAVTSGNYPNWVQQKPGQAPRGLIGGTKFLAPGTPARFSGSLLGGKAALTLSGVQPEDEAEYYCVLWYSNRWVFGGGTKLTVL

SEQ ID NO: 1291 - protein, 991 aa, Artificial Sequence
  Synthetic peptide
DIVMTQSPLSLPVTPGEPASISCRSSQSLLHKNAFNYLDWYLQKPGQSPQLLIYLGSNRASGVPDRFSGSGSGTDFTLKISRVEAEDVGVYYCMQALQTPFTFGCGTKVEIKGGGGSGGGGSGGGGSQVQLVESGGGVVQPGRSLRLSCAASGFTFSSYGIHWVRQAPGKCLEWVALTSYEGGNKYYAESVKGRFTISRDNSKNTLYLQMNSLRAEDTAVYYCAKDRGTIFGDYGMDVWGQGTTVTVSSGGGGSEVQLVESGGGLVQPGGSLKLSCAASGFTFNKYAMNWVRQAPGKGLEWVARIRSKYNNYATYYADSVKDRFTISRDDSKNTAYLQMNNLKTEDTAVYYCVRHGNFGNSYISYWAYWGQGTLVTVSSGGGGSGGGGSGGGGSQTVVTQEPSLTVSPGGTVTLTCGSSTGAVTSGNYPNWVQQKPGQAPRGLIGGTKFLAPGTPARFSGSLLGGKAALTLSGVQPEDEAEYYCVLWYSNRWVFGGGTKLTVLGGGGDKTHTCPPCPAPELLGGPSVFLFPPKPKDTLMISRTPEVTCVVVDVSHEDPEVKFNWYVDGVEVHNAKTKPCEEQYGSTYRCVSVLTVLHQDWLNGKEYKCKVSNKALPAPIEKTISKAKGQPREPQVYTLPPSREEMTKNQVSLTCLVKGFYPSDIAVEWESNGQPENNYKTTPPVLDSDGSFFLYSKLTVDKSRWQQGNVFSCSVMHEALHNHYTQKSLSLSPGKGGGGSGGGGSGGGGSGGGGSGGGGSGGGGSDKTHTCPPCPAPELLGGPSVFLFPPKPKDTLMISRTPEVTCVVVDVSHEDPEVKFNWYVDGVEVHNAKTKPCEEQYGSTYRCVSVLTVLHQDWLNGKEYKCKVSNKALPAPIEKTISKAKGQPREPQVYTLPPSREEMTKNQVSLTCLVKGFYPSDIAVEWESNGQPENNYKTTPPVLDSDGSFFLYSKLTVDKSRWQQGNVFSCSVMHEALHNHYTQKSLSLSPGK

SEQ ID NO: 1292 - protein, 989 aa, Artificial Sequence
  Synthetic peptide
DIVMTQSPLSLPVTPGEPASISCRSSQSLLHKNAFNYLDWYLQKPGQSPQLLIYLGSNRASGVPDRFSGSGSGTDFTLKISRVEAEDVGVYYCMQALQTPFTFGCGTKVEIKGGGGSGGGGSGGGGSQVQLVESGGGVVQPGRSLRLSCAASGFTFSSYGIHWVRQAPGKCLEWVALTSYEGGNKYYAESVKGRFTISRDNSKNTLYLQMNSLRAEDTAVYYCAKDRGTIFGDYGMDVWGQGTTVTVSSGGGGSEVQLVESGGGLVQPGGSLKLSCAASGFTFNKYAMNWVRQAPGKGLEWVARIRSKYNNYATYYADSVKDRFTISRDDSKNTAYLQMNNLKTEDTAVYYCVRHGNFGNSYISYWAYWGQGTLVTVSSGGGGSGGGGSGGGGSQTVVTQEPSLTVSPGGTVTLTCGSSTGAVTSGNYPNWVQQKPGQAPRGLIGGTKFLAPGTPARFSGSLLGGKAALTLSGVQPEDEAEYYCVLWYSNRWVFGGGTKLTVLGGGGDKTHTCPPCPAPELLGGPSVFLFPPKPKDTLMISRTPEVTCVVVDVSHEDPEVKFNWYVDGVEVHNAKTKPCEEQYGSTYRCVSVLTVLHQDWLNGKEYKCKVSNKALPAPIEKTISKAKGQPREPQVYTLPPSREEMTKNQVSLTCLVKGFYPSDIAVEWESNGQPENNYKTTPPVLDSDGSFFLYSKLTVDKSRWQQGNVFSCSVMHEALHNHYTQKSLSLSPGGGGSGGGGSGGGGSGGGGSGGGGSGGGGSDKTHTCPPCPAPELLGGPSVFLFPPKPKDTLMISRTPEVTCVVVDVSHEDPEVKFNWYVDGVEVHNAKTKPCEEQYGSTYRCVSVLTVLHQDWLNGKEYKCKVSNKALPAPIEKTISKAKGQPREPQVYTLPPSREEMTKNQVSLTCLVKGFYPSDIAVEWESNGQPENNYKTTPPVLDSDGSFFLYSKLTVDKSRWQQGNVFSCSVMHEALHNHYTQKSLSLSPGK

SEQ ID NO: 1293 - protein, 5 aa, Artificial Sequence
  Synthetic peptide
SYGIH

SEQ ID NO: 1294 - protein, 17 aa, Artificial Sequence
  Synthetic peptide
LTSYEGGNKYYAESVKG

SEQ ID NO: 1295 - protein, 13 aa, Artificial Sequence
  Synthetic peptide
DRGTIFGDYGMDV

SEQ ID NO: 1296 - protein, 16 aa, Artificial Sequence
  Synthetic peptide
RSSQSLLHQNRFNYLD

SEQ ID NO: 1297 - protein, 7 aa, Artificial Sequence
  Synthetic peptide
LGSNRAS

SEQ ID NO: 1298 - protein, 9 aa, Artificial Sequence
  Synthetic peptide
MQALQTPFT

SEQ ID NO: 1299 - protein, 122 aa, Artificial Sequence; identical to SEQ ID NO: 1287
  Synthetic peptide

SEQ ID NO: 1300 - protein, 112 aa, Artificial Sequence
  Synthetic peptide
DIVMTQSPLSLPVTPGEPASISCRSSQSLLHQNRFNYLDWYLQKPGQSPQLLIYLGSNRASGVPDRFSGSGSGTDFTLKISRVEAEDVGVYYCMQALQTPFTFGCGTKVEIK

SEQ ID NO: 1301 - protein, 249 aa, Artificial Sequence
  Synthetic peptide
DIVMTQSPLSLPVTPGEPASISCRSSQSLLHQNRFNYLDWYLQKPGQSPQLLIYLGSNRASGVPDRFSGSGSGTDFTLKISRVEAEDVGVYYCMQALQTPFTFGCGTKVEIKGGGGSGGGGSGGGGSQVQLVESGGGVVQPGRSLRLSCAASGFTFSSYGIHWVRQAPGKCLEWVALTSYEGGNKYYAESVKGRFTISRDNSKNTLYLQMNSLRAEDTAVYYCAKDRGTIFGDYGMDVWGQGTTVTVSS

SEQ ID NO: 1302 - protein, 503 aa, Artificial Sequence
  Synthetic peptide
DIVMTQSPLSLPVTPGEPASISCRSSQSLLHQNRFNYLDWYLQKPGQSPQLLIYLGSNRASGVPDRFSGSGSGTDFTLKISRVEAEDVGVYYCMQALQTPFTFGCGTKVEIKGGGGSGGGGSGGGGSQVQLVESGGGVVQPGRSLRLSCAASGFTFSSYGIHWVRQAPGKCLEWVALTSYEGGNKYYAESVKGRFTISRDNSKNTLYLQMNSLRAEDTAVYYCAKDRGTIFGDYGMDVWGQGTTVTVSSGGGGSEVQLVESGGGLVQPGGSLKLSCAASGFTFNKYAMNWVRQAPGKGLEWVARIRSKYNNYATYYADSVKDRFTISRDDSKNTAYLQMNNLKTEDTAVYYCVRHGNFGNSYISYWAYWGQGTLVTVSSGGGGSGGGGSGGGGSQTVVTQEPSLTVSPGGTVTLTCGSSTGAVTSGNYPNWVQQKPGQAPRGLIGGTKFLAPGTPARFSGSLLGGKAALTLSGVQPEDEAEYYCVLWYSNRWVFGGGTKLTVL

SEQ ID NO: 1303 - protein, 991 aa, Artificial Sequence
  Synthetic peptide
DIVMTQSPLSLPVTPGEPASISCRSSQSLLHQNRFNYLDWYLQKPGQSPQLLIYLGSNRASGVPDRFSGSGSGTDFTLKISRVEAEDVGVYYCMQALQTPFTFGCGTKVEIKGGGGSGGGGSGGGGSQVQLVESGGGVVQPGRSLRLSCAASGFTFSSYGIHWVRQAPGKCLEWVALTSYEGGNKYYAESVKGRFTISRDNSKNTLYLQMNSLRAEDTAVYYCAKDRGTIFGDYGMDVWGQGTTVTVSSGGGGSEVQLVESGGGLVQPGGSLKLSCAASGFTFNKYAMNWVRQAPGKGLEWVARIRSKYNNYATYYADSVKDRFTISRDDSKNTAYLQMNNLKTEDTAVYYCVRHGNFGNSYISYWAYWGQGTLVTVSSGGGGSGGGGSGGGGSQTVVTQEPSLTVSPGGTVTLTCGSSTGAVTSGNYPNWVQQKPGQAPRGLIGGTKFLAPGTPARFSGSLLGGKAALTLSGVQPEDEAEYYCVLWYSNRWVFGGGTKLTVLGGGGDKTHTCPPCPAPELLGGPSVFLFPPKPKDTLMISRTPEVTCVVVDVSHEDPEVKFNWYVDGVEVHNAKTKPCEEQYGSTYRCVSVLTVLHQDWLNGKEYKCKVSNKALPAPIEKTISKAKGQPREPQVYTLPPSREEMTKNQVSLTCLVKGFYPSDIAVEWESNGQPENNYKTTPPVLDSDGSFFLYSKLTVDKSRWQQGNVFSCSVMHEALHNHYTQKSLSLSPGKGGGGSGGGGSGGGGSGGGGSGGGGSGGGGSDKTHTCPPCPAPELLGGPSVFLFPPKPKDTLMISRTPEVTCVVVDVSHEDPEVKFNWYVDGVEVHNAKTKPCEEQYGSTYRCVSVLTVLHQDWLNGKEYKCKVSNKALPAPIEKTISKAKGQPREPQVYTLPPSREEMTKNQVSLTCLVKGFYPSDIAVEWESNGQPENNYKTTPPVLDSDGSFFLYSKLTVDKSRWQQGNVFSCSVMHEALHNHYTQKSLSLSPGK

SEQ ID NO: 1304 - protein, 989 aa, Artificial Sequence
  Synthetic peptide
DIVMTQSPLSLPVTPGEPASISCRSSQSLLHQNRFNYLDWYLQKPGQSPQLLIYLGSNRASGVPDRFSGSGSGTDFTLKISRVEAEDVGVYYCMQALQTPFTFGCGTKVEIKGGGGSGGGGSGGGGSQVQLVESGGGVVQPGRSLRLSCAASGFTFSSYGIHWVRQAPGKCLEWVALTSYEGGNKYYAESVKGRFTISRDNSKNTLYLQMNSLRAEDTAVYYCAKDRGTIFGDYGMDVWGQGTTVTVSSGGGGSEVQLVESGGGLVQPGGSLKLSCAASGFTFNKYAMNWVRQAPGKGLEWVARIRSKYNNYATYYADSVKDRFTISRDDSKNTAYLQMNNLKTEDTAVYYCVRHGNFGNSYISYWAYWGQGTLVTVSSGGGGSGGGGSGGGGSQTVVTQEPSLTVSPGGTVTLTCGSSTGAVTSGNYPNWVQQKPGQAPRGLIGGTKFLAPGTPARFSGSLLGGKAALTLSGVQPEDEAEYYCVLWYSNRWVFGGGTKLTVLGGGGDKTHTCPPCPAPELLGGPSVFLFPPKPKDTLMISRTPEVTCVVVDVSHEDPEVKFNWYVDGVEVHNAKTKPCEEQYGSTYRCVSVLTVLHQDWLNGKEYKCKVSNKALPAPIEKTISKAKGQPREPQVYTLPPSREEMTKNQVSLTCLVKGFYPSDIAVEWESNGQPENNYKTTPPVLDSDGSFFLYSKLTVDKSRWQQGNVFSCSVMHEALHNHYTQKSLSLSPGGGGSGGGGSGGGGSGGGGSGGGGSGGGGSDKTHTCPPCPAPELLGGPSVFLFPPKPKDTLMISRTPEVTCVVVDVSHEDPEVKFNWYVDGVEVHNAKTKPCEEQYGSTYRCVSVLTVLHQDWLNGKEYKCKVSNKALPAPIEKTISKAKGQPREPQVYTLPPSREEMTKNQVSLTCLVKGFYPSDIAVEWESNGQPENNYKTTPPVLDSDGSFFLYSKLTVDKSRWQQGNVFSCSVMHEALHNHYTQKSLSLSPGK

SEQ ID NO: 1305 - protein, 5 aa, Artificial Sequence
  Synthetic peptide
SYGIH

SEQ ID NO: 1306 - protein, 17 aa, Artificial Sequence
  Synthetic peptide
LTSYEGGNKYYAESVKG

SEQ ID NO: 1307 - protein, 13 aa, Artificial Sequence
  Synthetic peptide
DRGTIFGDYGMEV

SEQ ID NO: 1308 - protein, 16 aa, Artificial Sequence
  Synthetic peptide
RSSQSLLHPNKLNYLD

SEQ ID NO: 1309 - protein, 7 aa, Artificial Sequence
  Synthetic peptide
LGSNRAS

SEQ ID NO: 1310 - protein, 9 aa, Artificial Sequence
  Synthetic peptide
MQALQTPFT

SEQ ID NO: 1311 - protein, 122 aa, Artificial Sequence
  Synthetic peptide
QVQLVESGGGVVQPGRSLRLSCAASGFTFSSYGIHWVRQAPGKCLEWVALTSYEGGNKYYAESVKGRFTISRDNSKNTLYLQMNSLRAEDTAVYYCAKDRGTIFGDYGMEVWGQGTTVTVSS

SEQ ID NO: 1312 - protein, 112 aa, Artificial Sequence
  Synthetic peptide
DIVMTQSPLSLPVTPGEPASISCRSSQSLLHPNKLNYLDWYMQKPGQSPQLLIYLGSNRASGVPDRFSGSGSGTDFTLKISRVEAEDVGVYYCMQALQTPFTFGCGTKVEIK

SEQ ID NO: 1313 - protein, 249 aa, Artificial Sequence
  Synthetic peptide
DIVMTQSPLSLPVTPGEPASISCRSSQSLLHPNKLNYLDWYMQKPGQSPQLLIYLGSNRASGVPDRFSGSGSGTDFTLKISRVEAEDVGVYYCMQALQTPFTFGCGTKVEIKGGGGSGGGGSGGGGSQVQLVESGGGVVQPGRSLRLSCAASGFTFSSYGIHWVRQAPGKCLEWVALTSYEGGNKYYAESVKGRFTISRDNSKNTLYLQMNSLRAEDTAVYYCAKDRGTIFGDYGMEVWGQGTTVTVSS

SEQ ID NO: 1314 - protein, 503 aa, Artificial Sequence
  Synthetic peptide
DIVMTQSPLSLPVTPGEPASISCRSSQSLLHPNKLNYLDWYMQKPGQSPQLLIYLGSNRASGVPDRFSGSGSGTDFTLKISRVEAEDVGVYYCMQALQTPFTFGCGTKVEIKGGGGSGGGGSGGGGSQVQLVESGGGVVQPGRSLRLSCAASGFTFSSYGIHWVRQAPGKCLEWVALTSYEGGNKYYAESVKGRFTISRDNSKNTLYLQMNSLRAEDTAVYYCAKDRGTIFGDYGMEVWGQGTTVTVSSGGGGSEVQLVESGGGLVQPGGSLKLSCAASGFTFNKYAMNWVRQAPGKGLEWVARIRSKYNNYATYYADSVKDRFTISRDDSKNTAYLQMNNLKTEDTAVYYCVRHGNFGNSYISYWAYWGQGTLVTVSSGGGGSGGGGSGGGGSQTVVTQEPSLTVSPGGTVTLTCGSSTGAVTSGNYPNWVQQKPGQAPRGLIGGTKFLAPGTPARFSGSLLGGKAALTLSGVQPEDEAEYYCVLWYSNRWVFGGGTKLTVL

SEQ ID NO: 1315 - protein, 991 aa, Artificial Sequence
  Synthetic peptide
DIVMTQSPLSLPVTPGEPASISCRSSQSLLHPNKLNYLDWYMQKPGQSPQLLIYLGSNRASGVPDRFSGSGSGTDFTLKISRVEAEDVGVYYCMQALQTPFTFGCGTKVEIKGGGGSGGGGSGGGGSQVQLVESGGGVVQPGRSLRLSCAASGFTFSSYGIHWVRQAPGKCLEWVALTSYEGGNKYYAESVKGRFTISRDNSKNTLYLQMNSLRAEDTAVYYCAKDRGTIFGDYGMEVWGQGTTVTVSSGGGGSEVQLVESGGGLVQPGGSLKLSCAASGFTFNKYAMNWVRQAPGKGLEWVARIRSKYNNYATYYADSVKDRFTISRDDSKNTAYLQMNNLKTEDTAVYYCVRHGNFGNSYISYWAYWGQGTLVTVSSGGGGSGGGGSGGGGSQTVVTQEPSLTVSPGGTVTLTCGSSTGAVTSGNYPNWVQQKPGQAPRGLIGGTKFLAPGTPARFSGSLLGGKAALTLSGVQPEDEAEYYCVLWYSNRWVFGGGTKLTVLGGGGDKTHTCPPCPAPELLGGPSVFLFPPKPKDTLMISRTPEVTCVVVDVSHEDPEVKFNWYVDGVEVHNAKTKPCEEQYGSTYRCVSVLTVLHQDWLNGKEYKCKVSNKALPAPIEKTISKAKGQPREPQVYTLPPSREEMTKNQVSLTCLVKGFYPSDIAVEWESNGQPENNYKTTPPVLDSDGSFFLYSKLTVDKSRWQQGNVFSCSVMHEALHNHYTQKSLSLSPGKGGGGSGGGGSGGGGSGGGGSGGGGSGGGGSDKTHTCPPCPAPELLGGPSVFLFPPKPKDTLMISRTPEVTCVVVDVSHEDPEVKFNWYVDGVEVHNAKTKPCEEQYGSTYRCVSVLTVLHQDWLNGKEYKCKVSNKALPAPIEKTISKAKGQPREPQVYTLPPSREEMTKNQVSLTCLVKGFYPSDIAVEWESNGQPENNYKTTPPVLDSDGSFFLYSKLTVDKSRWQQGNVFSCSVMHEALHNHYTQKSLSLSPGK

SEQ ID NO: 1316 - protein, 989 aa, Artificial Sequence
  Synthetic peptide
DIVMTQSPLSLPVTPGEPASISCRSSQSLLHPNKLNYLDWYMQKPGQSPQLLIYLGSNRASGVPDRFSGSGSGTDFTLKISRVEAEDVGVYYCMQALQTPFTFGCGTKVEIKGGGGSGGGGSGGGGSQVQLVESGGGVVQPGRSLRLSCAASGFTFSSYGIHWVRQAPGKCLEWVALTSYEGGNKYYAESVKGRFTISRDNSKNTLYLQMNSLRAEDTAVYYCAKDRGTIFGDYGMEVWGQGTTVTVSSGGGGSEVQLVESGGGLVQPGGSLKLSCAASGFTFNKYAMNWVRQAPGKGLEWVARIRSKYNNYATYYADSVKDRFTISRDDSKNTAYLQMNNLKTEDTAVYYCVRHGNFGNSYISYWAYWGQGTLVTVSSGGGGSGGGGSGGGGSQTVVTQEPSLTVSPGGTVTLTCGSSTGAVTSGNYPNWVQQKPGQAPRGLIGGTKFLAPGTPARFSGSLLGGKAALTLSGVQPEDEAEYYCVLWYSNRWVFGGGTKLTVLGGGGDKTHTCPPCPAPELLGGPSVFLFPPKPKDTLMISRTPEVTCVVVDVSHEDPEVKFNWYVDGVEVHNAKTKPCEEQYGSTYRCVSVLTVLHQDWLNGKEYKCKVSNKALPAPIEKTISKAKGQPREPQVYTLPPSREEMTKNQVSLTCLVKGFYPSDIAVEWESNGQPENNYKTTPPVLDSDGSFFLYSKLTVDKSRWQQGNVFSCSVMHEALHNHYTQKSLSLSPGGGGSGGGGSGGGGSGGGGSGGGGSGGGGSDKTHTCPPCPAPELLGGPSVFLFPPKPKDTLMISRTPEVTCVVVDVSHEDPEVKFNWYVDGVEVHNAKTKPCEEQYGSTYRCVSVLTVLHQDWLNGKEYKCKVSNKALPAPIEKTISKAKGQPREPQVYTLPPSREEMTKNQVSLTCLVKGFYPSDIAVEWESNGQPENNYKTTPPVLDSDGSFFLYSKLTVDKSRWQQGNVFSCSVMHEALHNHYTQKSLSLSPGK

SEQ ID NO: 1317 - protein, 5 aa, Artificial Sequence
  Synthetic peptide
SYGIH

SEQ ID NO: 1318 - protein, 17 aa, Artificial Sequence
  Synthetic peptide
LTSYEGGNKYYAESVKG

SEQ ID NO: 1319 - protein, 13 aa, Artificial Sequence
  Synthetic peptide
DRGTIFGDYGMDV

SEQ ID NO: 1320 - protein, 16 aa, Artificial Sequence
  Synthetic peptide
RSSQSLLHKNRFNYLD

SEQ ID NO: 1321 - protein, 7 aa, Artificial Sequence
  Synthetic peptide
LGSNRAS

SEQ ID NO: 1322 - protein, 9 aa, Artificial Sequence
  Synthetic peptide
MQALQTPFT

SEQ ID NO: 1323 - protein, 122 aa, Artificial Sequence; identical to SEQ ID NO: 1287
  Synthetic peptide

SEQ ID NO: 1324 - protein, 112 aa, Artificial Sequence
  Synthetic peptide
DIVMTQSPLSLPVTPGEPASISCRSSQSLLHKNRFNYLDWYVQKPGQSPQLLIYLGSNRASGVPDRFSGSGSGTDFTLKISRVEAEDVGVYYCMQALQTPFTFGCGTKVEIK

SEQ ID NO: 1325 - protein, 249 aa, Artificial Sequence
  Synthetic peptide
DIVMTQSPLSLPVTPGEPASISCRSSQSLLHKNRFNYLDWYVQKPGQSPQLLIYLGSNRASGVPDRFSGSGSGTDFTLKISRVEAEDVGVYYCMQALQTPFTFGCGTKVEIKGGGGSGGGGSGGGGSQVQLVESGGGVVQPGRSLRLSCAASGFTFSSYGIHWVRQAPGKCLEWVALTSYEGGNKYYAESVKGRFTISRDNSKNTLYLQMNSLRAEDTAVYYCAKDRGTIFGDYGMDVWGQGTTVTVSS

SEQ ID NO: 1326 - protein, 503 aa, Artificial Sequence
  Synthetic peptide
DIVMTQSPLSLPVTPGEPASISCRSSQSLLHKNRFNYLDWYVQKPGQSPQLLIYLGSNRASGVPDRFSGSGSGTDFTLKISRVEAEDVGVYYCMQALQTPFTFGCGTKVEIKGGGGSGGGGSGGGGSQVQLVESGGGVVQPGRSLRLSCAASGFTFSSYGIHWVRQAPGKCLEWVALTSYEGGNKYYAESVKGRFTISRDNSKNTLYLQMNSLRAEDTAVYYCAKDRGTIFGDYGMDVWGQGTTVTVSSGGGGSEVQLVESGGGLVQPGGSLKLSCAASGFTFNKYAMNWVRQAPGKGLEWVARIRSKYNNYATYYADSVKDRFTISRDDSKNTAYLQMNNLKTEDTAVYYCVRHGNFGNSYISYWAYWGQGTLVTVSSGGGGSGGGGSGGGGSQTVVTQEPSLTVSPGGTVTLTCGSSTGAVTSGNYPNWVQQKPGQAPRGLIGGTKFLAPGTPARFSGSLLGGKAALTLSGVQPEDEAEYYCVLWYSNRWVFGGGTKLTVL

SEQ ID NO: 1327 - protein, 991 aa, Artificial Sequence
  Synthetic peptide
DIVMTQSPLSLPVTPGEPASISCRSSQSLLHKNRFNYLDWYVQKPGQSPQLLIYLGSNRASGVPDRFSGSGSGTDFTLKISRVEAEDVGVYYCMQALQTPFTFGCGTKVEIKGGGGSGGGGSGGGGSQVQLVESGGGVVQPGRSLRLSCAASGFTFSSYGIHWVRQAPGKCLEWVALTSYEGGNKYYAESVKGRFTISRDNSKNTLYLQMNSLRAEDTAVYYCAKDRGTIFGDYGMDVWGQGTTVTVSSGGGGSEVQLVESGGGLVQPGGSLKLSCAASGFTFNKYAMNWVRQAPGKGLEWVARIRSKYNNYATYYADSVKDRFTISRDDSKNTAYLQMNNLKTEDTAVYYCVRHGNFGNSYISYWAYWGQGTLVTVSSGGGGSGGGGSGGGGSQTVVTQEPSLTVSPGGTVTLTCGSSTGAVTSGNYPNWVQQKPGQAPRGLIGGTKFLAPGTPARFSGSLLGGKAALTLSGVQPEDEAEYYCVLWYSNRWVFGGGTKLTVLGGGGDKTHTCPPCPAPELLGGPSVFLFPPKPKDTLMISRTPEVTCVVVDVSHEDPEVKFNWYVDGVEVHNAKTKPCEEQYGSTYRCVSVLTVLHQDWLNGKEYKCKVSNKALPAPIEKTISKAKGQPREPQVYTLPPSREEMTKNQVSLTCLVKGFYPSDIAVEWESNGQPENNYKTTPPVLDSDGSFFLYSKLTVDKSRWQQGNVFSCSVMHEALHNHYTQKSLSLSPGKGGGGSGGGGSGGGGSGGGGSGGGGSGGGGSDKTHTCPPCPAPELLGGPSVFLFPPKPKDTLMISRTPEVTCVVVDVSHEDPEVKFNWYVDGVEVHNAKTKPCEEQYGSTYRCVSVLTVLHQDWLNGKEYKCKVSNKALPAPIEKTISKAKGQPREPQVYTLPPSREEMTKNQVSLTCLVKGFYPSDIAVEWESNGQPENNYKTTPPVLDSDGSFFLYSKLTVDKSRWQQGNVFSCSVMHEALHNHYTQKSLSLSPGK

SEQ ID NO: 1328 - protein, 989 aa, Artificial Sequence
  Synthetic peptide
DIVMTQSPLSLPVTPGEPASISCRSSQSLLHKNRFNYLDWYVQKPGQSPQLLIYLGSNRASGVPDRFSGSGSGTDFTLKISRVEAEDVGVYYCMQALQTPFTFGCGTKVEIKGGGGSGGGGSGGGGSQVQLVESGGGVVQPGRSLRLSCAASGFTFSSYGIHWVRQAPGKCLEWVALTSYEGGNKYYAESVKGRFTISRDNSKNTLYLQMNSLRAEDTAVYYCAKDRGTIFGDYGMDVWGQGTTVTVSSGGGGSEVQLVESGGGLVQPGGSLKLSCAASGFTFNKYAMNWVRQAPGKGLEWVARIRSKYNNYATYYADSVKDRFTISRDDSKNTAYLQMNNLKTEDTAVYYCVRHGNFGNSYISYWAYWGQGTLVTVSSGGGGSGGGGSGGGGSQTVVTQEPSLTVSPGGTVTLTCGSSTGAVTSGNYPNWVQQKPGQAPRGLIGGTKFLAPGTPARFSGSLLGGKAALTLSGVQPEDEAEYYCVLWYSNRWVFGGGTKLTVLGGGGDKTHTCPPCPAPELLGGPSVFLFPPKPKDTLMISRTPEVTCVVVDVSHEDPEVKFNWYVDGVEVHNAKTKPCEEQYGSTYRCVSVLTVLHQDWLNGKEYKCKVSNKALPAPIEKTISKAKGQPREPQVYTLPPSREEMTKNQVSLTCLVKGFYPSDIAVEWESNGQPENNYKTTPPVLDSDGSFFLYSKLTVDKSRWQQGNVFSCSVMHEALHNHYTQKSLSLSPGGGGSGGGGSGGGGSGGGGSGGGGSGGGGSDKTHTCPPCPAPELLGGPSVFLFPPKPKDTLMISRTPEVTCVVVDVSHEDPEVKFNWYVDGVEVHNAKTKPCEEQYGSTYRCVSVLTVLHQDWLNGKEYKCKVSNKALPAPIEKTISKAKGQPREPQVYTLPPSREEMTKNQVSLTCLVKGFYPSDIAVEWESNGQPENNYKTTPPVLDSDGSFFLYSKLTVDKSRWQQGNVFSCSVMHEALHNHYTQKSLSLSPGK

SEQ ID NO: 1329 - protein, 5 aa, Artificial Sequence
  Synthetic peptide
SYGIH

SEQ ID NO: 1330 - protein, 17 aa, Artificial Sequence
  Synthetic peptide
LTSYEGGNKYYAESVKG

SEQ ID NO: 1331 - protein, 13 aa, Artificial Sequence
  Synthetic peptide
DRGTIFGDYGMDV

SEQ ID NO: 1332 - protein, 16 aa, Artificial Sequence
  Synthetic peptide
RSSQSLLHRNSWNYLD

SEQ ID NO: 1333 - protein, 7 aa, Artificial Sequence
  Synthetic peptide
LGSNRAS

SEQ ID NO: 1334 - protein, 9 aa, Artificial Sequence
  Synthetic peptide
MQALQTPFT

SEQ ID NO: 1335 - protein, 122 aa, Artificial Sequence; identical to SEQ ID NO: 1287
  Synthetic peptide

SEQ ID NO: 1336 - protein, 112 aa, Artificial Sequence
  Synthetic peptide
DIVMTQSPLSLPVTPGEPASISCRSSQSLLHRNSWNYLDWYLQKPGQSPQLLIYLGSNRASGVPDRFSGSGSGTDFTLKISRVEAEDVGVYYCMQALQTPFTFGCGTKVEIK

SEQ ID NO: 1337 - protein, 249 aa, Artificial Sequence
  Synthetic peptide
DIVMTQSPLSLPVTPGEPASISCRSSQSLLHRNSWNYLDWYLQKPGQSPQLLIYLGSNRASGVPDRFSGSGSGTDFTLKISRVEAEDVGVYYCMQALQTPFTFGCGTKVEIKGGGGSGGGGSGGGGSQVQLVESGGGVVQPGRSLRLSCAASGFTFSSYGIHWVRQAPGKCLEWVALTSYEGGNKYYAESVKGRFTISRDNSKNTLYLQMNSLRAEDTAVYYCAKDRGTIFGDYGMDVWGQGTTVTVSS

SEQ ID NO: 1338 - protein, 503 aa, Artificial Sequence
  Synthetic peptide
DIVMTQSPLSLPVTPGEPASISCRSSQSLLHRNSWNYLDWYLQKPGQSPQLLIYLGSNRASGVPDRFSGSGSGTDFTLKISRVEAEDVGVYYCMQALQTPFTFGCGTKVEIKGGGGSGGGGSGGGGSQVQLVESGGGVVQPGRSLRLSCAASGFTFSSYGIHWVRQAPGKCLEWVALTSYEGGNKYYAESVKGRFTISRDNSKNTLYLQMNSLRAEDTAVYYCAKDRGTIFGDYGMDVWGQGTTVTVSSGGGGSEVQLVESGGGLVQPGGSLKLSCAASGFTFNKYAMNWVRQAPGKGLEWVARIRSKYNNYATYYADSVKDRFTISRDDSKNTAYLQMNNLKTEDTAVYYCVRHGNFGNSYISYWAYWGQGTLVTVSSGGGGSGGGGSGGGGSQTVVTQEPSLTVSPGGTVTLTCGSSTGAVTSGNYPNWVQQKPGQAPRGLIGGTKFLAPGTPARFSGSLLGGKAALTLSGVQPEDEAEYYCVLWYSNRWVFGGGTKLTVL

SEQ ID NO: 1339 - protein, 991 aa, Artificial Sequence
  Synthetic peptide
DIVMTQSPLSLPVTPGEPASISCRSSQSLLHRNSWNYLDWYLQKPGQSPQLLIYLGSNRASGVPDRFSGSGSGTDFTLKISRVEAEDVGVYYCMQALQTPFTFGCGTKVEIKGGGGSGGGGSGGGGSQVQLVESGGGVVQPGRSLRLSCAASGFTFSSYGIHWVRQAPGKCLEWVALTSYEGGNKYYAESVKGRFTISRDNSKNTLYLQMNSLRAEDTAVYYCAKDRGTIFGDYGMDVWGQGTTVTVSSGGGGSEVQLVESGGGLVQPGGSLKLSCAASGFTFNKYAMNWVRQAPGKGLEWVARIRSKYNNYATYYADSVKDRFTISRDDSKNTAYLQMNNLKTEDTAVYYCVRHGNFGNSYISYWAYWGQGTLVTVSSGGGGSGGGGSGGGGSQTVVTQEPSLTVSPGGTVTLTCGSSTGAVTSGNYPNWVQQKPGQAPRGLIGGTKFLAPGTPARFSGSLLGGKAALTLSGVQPEDEAEYYCVLWYSNRWVFGGGTKLTVLGGGGDKTHTCPPCPAPELLGGPSVFLFPPKPKDTLMISRTPEVTCVVVDVSHEDPEVKFNWYVDGVEVHNAKTKPCEEQYGSTYRCVSVLTVLHQDWLNGKEYKCKVSNKALPAPIEKTISKAKGQPREPQVYTLPPSREEMTKNQVSLTCLVKGFYPSDIAVEWESNGQPENNYKTTPPVLDSDGSFFLYSKLTVDKSRWQQGNVFSCSVMHEALHNHYTQKSLSLSPGKGGGGSGGGGSGGGGSGGGGSGGGGSGGGGSDKTHTCPPCPAPELLGGPSVFLFPPKPKDTLMISRTPEVTCVVVDVSHEDPEVKFNWYVDGVEVHNAKTKPCEEQYGSTYRCVSVLTVLHQDWLNGKEYKCKVSNKALPAPIEKTISKAKGQPREPQVYTLPPSREEMTKNQVSLTCLVKGFYPSDIAVEWESNGQPENNYKTTPPVLDSDGSFFLYSKLTVDKSRWQQGNVFSCSVMHEALHNHYTQKSLSLSPGK

SEQ ID NO: 1340 - protein, 989 aa, Artificial Sequence
  Synthetic peptide
DIVMTQSPLSLPVTPGEPASISCRSSQSLLHRNSWNYLDWYLQKPGQSPQLLIYLGSNRASGVPDRFSGSGSGTDFTLKISRVEAEDVGVYYCMQALQTPFTFGCGTKVEIKGGGGSGGGGSGGGGSQVQLVESGGGVVQPGRSLRLSCAASGFTFSSYGIHWVRQAPGKCLEWVALTSYEGGNKYYAESVKGRFTISRDNSKNTLYLQMNSLRAEDTAVYYCAKDRGTIFGDYGMDVWGQGTTVTVSSGGGGSEVQLVESGGGLVQPGGSLKLSCAASGFTFNKYAMNWVRQAPGKGLEWVARIRSKYNNYATYYADSVKDRFTISRDDSKNTAYLQMNNLKTEDTAVYYCVRHGNFGNSYISYWAYWGQGTLVTVSSGGGGSGGGGSGGGGSQTVVTQEPSLTVSPGGTVTLTCGSSTGAVTSGNYPNWVQQKPGQAPRGLIGGTKFLAPGTPARFSGSLLGGKAALTLSGVQPEDEAEYYCVLWYSNRWVFGGGTKLTVLGGGGDKTHTCPPCPAPELLGGPSVFLFPPKPKDTLMISRTPEVTCVVVDVSHEDPEVKFNWYVDGVEVHNAKTKPCEEQYGSTYRCVSVLTVLHQDWLNGKEYKCKVSNKALPAPIEKTISKAKGQPREPQVYTLPPSREEMTKNQVSLTCLVKGFYPSDIAVEWESNGQPENNYKTTPPVLDSDGSFFLYSKLTVDKSRWQQGNVFSCSVMHEALHNHYTQKSLSLSPGGGGSGGGGSGGGGSGGGGSGGGGSGGGGSDKTHTCPPCPAPELLGGPSVFLFPPKPKDTLMISRTPEVTCVVVDVSHEDPEVKFNWYVDGVEVHNAKTKPCEEQYGSTYRCVSVLTVLHQDWLNGKEYKCKVSNKALPAPIEKTISKAKGQPREPQVYTLPPSREEMTKNQVSLTCLVKGFYPSDIAVEWESNGQPENNYKTTPPVLDSDGSFFLYSKLTVDKSRWQQGNVFSCSVMHEALHNHYTQKSLSLSPGK

SEQ ID NO: 1341 - protein, 5 aa, Artificial Sequence
  Synthetic peptide
SYGIH

SEQ ID NO: 1342 - protein, 17 aa, Artificial Sequence
  Synthetic peptide
LTSYEGGNKYYAESVKG

SEQ ID NO: 1343 - protein, 13 aa, Artificial Sequence
  Synthetic peptide
DRGTIFGDYGMDV

SEQ ID NO: 1344 - protein, 16 aa, Artificial Sequence
  Synthetic peptide
RSSQSLLHPNHFNYLD

SEQ ID NO: 1345 - protein, 7 aa, Artificial Sequence
  Synthetic peptide
LGSNRAS

SEQ ID NO: 1346 - protein, 9 aa, Artificial Sequence
  Synthetic peptide
MQALQTPFT

SEQ ID NO: 1347 - protein, 122 aa, Artificial Sequence; identical to SEQ ID NO: 1287
  Synthetic peptide

SEQ ID NO: 1348 - protein, 112 aa, Artificial Sequence
  Synthetic peptide
DIVMTQSPLSLPVTPGEPASISCRSSQSLLHPNHFNYLDWYLQKPGQSPQLLIYLGSNRASGVPDRFSGSGSGTDFTLKISRVEAEDVGVYYCMQALQTPFTFGCGTKVEIK

SEQ ID NO: 1349 - protein, 249 aa, Artificial Sequence
  Synthetic peptide
DIVMTQSPLSLPVTPGEPASISCRSSQSLLHPNHFNYLDWYLQKPGQSPQLLIYLGSNRASGVPDRFSGSGSGTDFTLKISRVEAEDVGVYYCMQALQTPFTFGCGTKVEIKGGGGSGGGGSGGGGSQVQLVESGGGVVQPGRSLRLSCAASGFTFSSYGIHWVRQAPGKCLEWVALTSYEGGNKYYAESVKGRFTISRDNSKNTLYLQMNSLRAEDTAVYYCAKDRGTIFGDYGMDVWGQGTTVTVSS

SEQ ID NO: 1350 - protein, 503 aa, Artificial Sequence
  Synthetic peptide
DIVMTQSPLSLPVTPGEPASISCRSSQSLLHPNHFNYLDWYLQKPGQSPQLLIYLGSNRASGVPDRFSGSGSGTDFTLKISRVEAEDVGVYYCMQALQTPFTFGCGTKVEIKGGGGSGGGGSGGGGSQVQLVESGGGVVQPGRSLRLSCAASGFTFSSYGIHWVRQAPGKCLEWVALTSYEGGNKYYAESVKGRFTISRDNSKNTLYLQMNSLRAEDTAVYYCAKDRGTIFGDYGMDVWGQGTTVTVSSGGGGSEVQLVESGGGLVQPGGSLKLSCAASGFTFNKYAMNWVRQAPGKGLEWVARIRSKYNNYATYYADSVKDRFTISRDDSKNTAYLQMNNLKTEDTAVYYCVRHGNFGNSYISYWAYWGQGTLVTVSSGGGGSGGGGSGGGGSQTVVTQEPSLTVSPGGTVTLTCGSSTGAVTSGNYPNWVQQKPGQAPRGLIGGTKFLAPGTPARFSGSLLGGKAALTLSGVQPEDEAEYYCVLWYSNRWVFGGGTKLTVL

SEQ ID NO: 1351 - protein, 991 aa, Artificial Sequence
  Synthetic peptide
DIVMTQSPLSLPVTPGEPASISCRSSQSLLHPNHFNYLDWYLQKPGQSPQLLIYLGSNRASGVPDRFSGSGSGTDFTLKISRVEAEDVGVYYCMQALQTPFTFGCGTKVEIKGGGGSGGGGSGGGGSQVQLVESGGGVVQPGRSLRLSCAASGFTFSSYGIHWVRQAPGKCLEWVALTSYEGGNKYYAESVKGRFTISRDNSKNTLYLQMNSLRAEDTAVYYCAKDRGTIFGDYGMDVWGQGTTVTVSSGGGGSEVQLVESGGGLVQPGGSLKLSCAASGFTFNKYAMNWVRQAPGKGLEWVARIRSKYNNYATYYADSVKDRFTISRDDSKNTAYLQMNNLKTEDTAVYYCVRHGNFGNSYISYWAYWGQGTLVTVSSGGGGSGGGGSGGGGSQTVVTQEPSLTVSPGGTVTLTCGSSTGAVTSGNYPNWVQQKPGQAPRGLIGGTKFLAPGTPARFSGSLLGGKAALTLSGVQPEDEAEYYCVLWYSNRWVFGGGTKLTVLGGGGDKTHTCPPCPAPELLGGPSVFLFPPKPKDTLMISRTPEVTCVVVDVSHEDPEVKFNWYVDGVEVHNAKTKPCEEQYGSTYRCVSVLTVLHQDWLNGKEYKCKVSNKALPAPIEKTISKAKGQPREPQVYTLPPSREEMTKNQVSLTCLVKGFYPSDIAVEWESNGQPENNYKTTPPVLDSDGSFFLYSKLTVDKSRWQQGNVFSCSVMHEALHNHYTQKSLSLSPGKGGGGSGGGGSGGGGSGGGGSGGGGSGGGGSDKTHTCPPCPAPELLGGPSVFLFPPKPKDTLMISRTPEVTCVVVDVSHEDPEVKFNWYVDGVEVHNAKTKPCEEQYGSTYRCVSVLTVLHQDWLNGKEYKCKVSNKALPAPIEKTISKAKGQPREPQVYTLPPSREEMTKNQVSLTCLVKGFYPSDIAVEWESNGQPENNYKTTPPVLDSDGSFFLYSKLTVDKSRWQQGNVFSCSVMHEALHNHYTQKSLSLSPGK

SEQ ID NO: 1352 - protein, 989 aa, Artificial Sequence
  Synthetic peptide
DIVMTQSPLSLPVTPGEPASISCRSSQSLLHPNHFNYLDWYLQKPGQSPQLLIYLGSNRASGVPDRFSGSGSGTDFTLKISRVEAEDVGVYYCMQALQTPFTFGCGTKVEIKGGGGSGGGGSGGGGSQVQLVESGGGVVQPGRSLRLSCAASGFTFSSYGIHWVRQAPGKCLEWVALTSYEGGNKYYAESVKGRFTISRDNSKNTLYLQMNSLRAEDTAVYYCAKDRGTIFGDYGMDVWGQGTTVTVSSGGGGSEVQLVESGGGLVQPGGSLKLSCAASGFTFNKYAMNWVRQAPGKGLEWVARIRSKYNNYATYYADSVKDRFTISRDDSKNTAYLQMNNLKTEDTAVYYCVRHGNFGNSYISYWAYWGQGTLVTVSSGGGGSGGGGSGGGGSQTVVTQEPSLTVSPGGTVTLTCGSSTGAVTSGNYPNWVQQKPGQAPRGLIGGTKFLAPGTPARFSGSLLGGKAALTLSGVQPEDEAEYYCVLWYSNRWVFGGGTKLTVLGGGGDKTHTCPPCPAPELLGGPSVFLFPPKPKDTLMISRTPEVTCVVVDVSHEDPEVKFNWYVDGVEVHNAKTKPCEEQYGSTYRCVSVLTVLHQDWLNGKEYKCKVSNKALPAPIEKTISKAKGQPREPQVYTLPPSREEMTKNQVSLTCLVKGFYPSDIAVEWESNGQPENNYKTTPPVLDSDGSFFLYSKLTVDKSRWQQGNVFSCSVMHEALHNHYTQKSLSLSPGGGGSGGGGSGGGGSGGGGSGGGGSGGGGSDKTHTCPPCPAPELLGGPSVFLFPPKPKDTLMISRTPEVTCVVVDVSHEDPEVKFNWYVDGVEVHNAKTKPCEEQYGSTYRCVSVLTVLHQDWLNGKEYKCKVSNKALPAPIEKTISKAKGQPREPQVYTLPPSREEMTKNQVSLTCLVKGFYPSDIAVEWESNGQPENNYKTTPPVLDSDGSFFLYSKLTVDKSRWQQGNVFSCSVMHEALHNHYTQKSLSLSPGK

SEQ ID NO: 1353 - protein, 5 aa, Artificial Sequence
  Synthetic peptide
SYGIH

SEQ ID NO: 1354 - protein, 17 aa, Artificial Sequence
  Synthetic peptide
LTSYEGGNKYYAESVKG

SEQ ID NO: 1355 - protein, 13 aa, Artificial Sequence
  Synthetic peptide
DRGTIFGDYGMDV

SEQ ID NO: 1356 - protein, 16 aa, Artificial Sequence
  Synthetic peptide
RSSQSLLHKNSFNYLD

SEQ ID NO: 1357 - protein, 7 aa, Artificial Sequence
  Synthetic peptide
LGSNRAS

SEQ ID NO: 1358 - protein, 9 aa, Artificial Sequence
  Synthetic peptide
MQALQTPFT

SEQ ID NO: 1359 - protein, 122 aa, Artificial Sequence; identical to SEQ ID NO: 1287
  Synthetic peptide

SEQ ID NO: 1360 - protein, 112 aa, Artificial Sequence
  Synthetic peptide
DIVMTQSPLSLPVTPGEPASISCRSSQSLLHKNSFNYLDWYLQKPGQSPQLLIYLGSNRASGVPDRFSGSGSGTDFTLKISRVEAEDVGVYYCMQALQTPFTFGCGTKVEIK

SEQ ID NO: 1361 - protein, 249 aa, Artificial Sequence
  Synthetic peptide
DIVMTQSPLSLPVTPGEPASISCRSSQSLLHKNSFNYLDWYLQKPGQSPQLLIYLGSNRASGVPDRFSGSGSGTDFTLKISRVEAEDVGVYYCMQALQTPFTFGCGTKVEIKGGGGSGGGGSGGGGSQVQLVESGGGVVQPGRSLRLSCAASGFTFSSYGIHWVRQAPGKCLEWVALTSYEGGNKYYAESVKGRFTISRDNSKNTLYLQMNSLRAEDTAVYYCAKDRGTIFGDYGMDVWGQGTTVTVSS

SEQ ID NO: 1362 - protein, 503 aa, Artificial Sequence
  Synthetic peptide
DIVMTQSPLSLPVTPGEPASISCRSSQSLLHKNSFNYLDWYLQKPGQSPQLLIYLGSNRASGVPDRFSGSGSGTDFTLKISRVEAEDVGVYYCMQALQTPFTFGCGTKVEIKGGGGSGGGGSGGGGSQVQLVESGGGVVQPGRSLRLSCAASGFTFSSYGIHWVRQAPGKCLEWVALTSYEGGNKYYAESVKGRFTISRDNSKNTLYLQMNSLRAEDTAVYYCAKDRGTIFGDYGMDVWGQGTTVTVSSGGGGSEVQLVESGGGLVQPGGSLKLSCAASGFTFNKYAMNWVRQAPGKGLEWVARIRSKYNNYATYYADSVKDRFTISRDDSKNTAYLQMNNLKTEDTAVYYCVRHGNFGNSYISYWAYWGQGTLVTVSSGGGGSGGGGSGGGGSQTVVTQEPSLTVSPGGTVTLTCGSSTGAVTSGNYPNWVQQKPGQAPRGLIGGTKFLAPGTPARFSGSLLGGKAALTLSGVQPEDEAEYYCVLWYSNRWVFGGGTKLTVL

SEQ ID NO: 1363 - protein, 991 aa, Artificial Sequence
  Synthetic peptide
DIVMTQSPLSLPVTPGEPASISCRSSQSLLHKNSFNYLDWYLQKPGQSPQLLIYLGSNRASGVPDRFSGSGSGTDFTLKISRVEAEDVGVYYCMQALQTPFTFGCGTKVEIKGGGGSGGGGSGGGGSQVQLVESGGGVVQPGRSLRLSCAASGFTFSSYGIHWVRQAPGKCLEWVALTSYEGGNKYYAESVKGRFTISRDNSKNTLYLQMNSLRAEDTAVYYCAKDRGTIFGDYGMDVWGQGTTVTVSSGGGGSEVQLVESGGGLVQPGGSLKLSCAASGFTFNKYAMNWVRQAPGKGLEWVARIRSKYNNYATYYADSVKDRFTISRDDSKNTAYLQMNNLKTEDTAVYYCVRHGNFGNSYISYWAYWGQGTLVTVSSGGGGSGGGGSGGGGSQTVVTQEPSLTVSPGGTVTLTCGSSTGAVTSGNYPNWVQQKPGQAPRGLIGGTKFLAPGTPARFSGSLLGGKAALTLSGVQPEDEAEYYCVLWYSNRWVFGGGTKLTVLGGGGDKTHTCPPCPAPELLGGPSVFLFPPKPKDTLMISRTPEVTCVVVDVSHEDPEVKFNWYVDGVEVHNAKTKPCEEQYGSTYRCVSVLTVLHQDWLNGKEYKCKVSNKALPAPIEKTISKAKGQPREPQVYTLPPSREEMTKNQVSLTCLVKGFYPSDIAVEWESNGQPENNYKTTPPVLDSDGSFFLYSKLTVDKSRWQQGNVFSCSVMHEALHNHYTQKSLSLSPGKGGGGSGGGGSGGGGSGGGGSGGGGSGGGGSDKTHTCPPCPAPELLGGPSVFLFPPKPKDTLMISRTPEVTCVVVDVSHEDPEVKFNWYVDGVEVHNAKTKPCEEQYGSTYRCVSVLTVLHQDWLNGKEYKCKVSNKALPAPIEKTISKAKGQPREPQVYTLPPSREEMTKNQVSLTCLVKGFYPSDIAVEWESNGQPENNYKTTPPVLDSDGSFFLYSKLTVDKSRWQQGNVFSCSVMHEALHNHYTQKSLSLSPGK

SEQ ID NO: 1364 - protein, 989 aa, Artificial Sequence
  Synthetic peptide
DIVMTQSPLSLPVTPGEPASISCRSSQSLLHKNSFNYLDWYLQKPGQSPQLLIYLGSNRASGVPDRFSGSGSGTDFTLKISRVEAEDVGVYYCMQALQTPFTFGCGTKVEIKGGGGSGGGGSGGGGSQVQLVESGGGVVQPGRSLRLSCAASGFTFSSYGIHWVRQAPGKCLEWVALTSYEGGNKYYAESVKGRFTISRDNSKNTLYLQMNSLRAEDTAVYYCAKDRGTIFGDYGMDVWGQGTTVTVSSGGGGSEVQLVESGGGLVQPGGSLKLSCAASGFTFNKYAMNWVRQAPGKGLEWVARIRSKYNNYATYYADSVKDRFTISRDDSKNTAYLQMNNLKTEDTAVYYCVRHGNFGNSYISYWAYWGQGTLVTVSSGGGGSGGGGSGGGGSQTVVTQEPSLTVSPGGTVTLTCGSSTGAVTSGNYPNWVQQKPGQAPRGLIGGTKFLAPGTPARFSGSLLGGKAALTLSGVQPEDEAEYYCVLWYSNRWVFGGGTKLTVLGGGGDKTHTCPPCPAPELLGGPSVFLFPPKPKDTLMISRTPEVTCVVVDVSHEDPEVKFNWYVDGVEVHNAKTKPCEEQYGSTYRCVSVLTVLHQDWLNGKEYKCKVSNKALPAPIEKTISKAKGQPREPQVYTLPPSREEMTKNQVSLTCLVKGFYPSDIAVEWESNGQPENNYKTTPPVLDSDGSFFLYSKLTVDKSRWQQGNVFSCSVMHEALHNHYTQKSLSLSPGGGGSGGGGSGGGGSGGGGSGGGGSGGGGSDKTHTCPPCPAPELLGGPSVFLFPPKPKDTLMISRTPEVTCVVVDVSHEDPEVKFNWYVDGVEVHNAKTKPCEEQYGSTYRCVSVLTVLHQDWLNGKEYKCKVSNKALPAPIEKTISKAKGQPREPQVYTLPPSREEMTKNQVSLTCLVKGFYPSDIAVEWESNGQPENNYKTTPPVLDSDGSFFLYSKLTVDKSRWQQGNVFSCSVMHEALHNHYTQKSLSLSPGK

SEQ ID NO: 1365 - protein, 5 aa, Artificial Sequence
  Synthetic peptide
SYGIH

SEQ ID NO: 1366 - protein, 17 aa, Artificial Sequence
  Synthetic peptide
LTSYEGGNKYYAESVKG

SEQ ID NO: 1367 - protein, 13 aa, Artificial Sequence
  Synthetic peptide
DRGTIFGDYGMDV

SEQ ID NO: 1368 - protein, 16 aa, Artificial Sequence
  Synthetic peptide
RSSQSLLHKNHFNYLD

SEQ ID NO: 1369 - protein, 7 aa, Artificial Sequence
  Synthetic peptide
LGSNRAS

SEQ ID NO: 1370 - protein, 9 aa, Artificial Sequence
  Synthetic peptide
MQALQTPFT

SEQ ID NO: 1371 - protein, 122 aa, Artificial Sequence; identical to SEQ ID NO: 1287
  Synthetic peptide

SEQ ID NO: 1372 - protein, 112 aa, Artificial Sequence
  Synthetic peptide
DIVMTQSPLSLPVTPGEPASISCRSSQSLLHKNHFNYLDWYLQKPGQSPQLLIYLGSNRASGVPDRFSGSGSGTDFTLKISRVEAEDVGVYYCMQALQTPFTFGCGTKVEIK

SEQ ID NO: 1373 - protein, 249 aa, Artificial Sequence
  Synthetic peptide
DIVMTQSPLSLPVTPGEPASISCRSSQSLLHKNHFNYLDWYLQKPGQSPQLLIYLGSNRASGVPDRFSGSGSGTDFTLKISRVEAEDVGVYYCMQALQTPFTFGCGTKVEIKGGGGSGGGGSGGGGSQVQLVESGGGVVQPGRSLRLSCAASGFTFSSYGIHWVRQAPGKCLEWVALTSYEGGNKYYAESVKGRFTISRDNSKNTLYLQMNSLRAEDTAVYYCAKDRGTIFGDYGMDVWGQGTTVTVSS

SEQ ID NO: 1374 - protein, 503 aa, Artificial Sequence
  Synthetic peptide
DIVMTQSPLSLPVTPGEPASISCRSSQSLLHKNHFNYLDWYLQKPGQSPQLLIYLGSNRASGVPDRFSGSGSGTDFTLKISRVEAEDVGVYYCMQALQTPFTFGCGTKVEIKGGGGSGGGGSGGGGSQVQLVESGGGVVQPGRSLRLSCAASGFTFSSYGIHWVRQAPGKCLEWVALTSYEGGNKYYAESVKGRFTISRDNSKNTLYLQMNSLRAEDTAVYYCAKDRGTIFGDYGMDVWGQGTTVTVSSGGGGSEVQLVESGGGLVQPGGSLKLSCAASGFTFNKYAMNWVRQAPGKGLEWVARIRSKYNNYATYYADSVKDRFTISRDDSKNTAYLQMNNLKTEDTAVYYCVRHGNFGNSYISYWAYWGQGTLVTVSSGGGGSGGGGSGGGGSQTVVTQEPSLTVSPGGTVTLTCGSSTGAVTSGNYPNWVQQKPGQAPRGLIGGTKFLAPGTPARFSGSLLGGKAALTLSGVQPEDEAEYYCVLWYSNRWVFGGGTKLTVL

SEQ ID NO: 1375 - protein, 991 aa, Artificial Sequence
  Synthetic peptide
DIVMTQSPLSLPVTPGEPASISCRSSQSLLHKNHFNYLDWYLQKPGQSPQLLIYLGSNRASGVPDRFSGSGSGTDFTLKISRVEAEDVGVYYCMQALQTPFTFGCGTKVEIKGGGGSGGGGSGGGGSQVQLVESGGGVVQPGRSLRLSCAASGFTFSSYGIHWVRQAPGKCLEWVALTSYEGGNKYYAESVKGRFTISRDNSKNTLYLQMNSLRAEDTAVYYCAKDRGTIFGDYGMDVWGQGTTVTVSSGGGGSEVQLVESGGGLVQPGGSLKLSCAASGFTFNKYAMNWVRQAPGKGLEWVARIRSKYNNYATYYADSVKDRFTISRDDSKNTAYLQMNNLKTEDTAVYYCVRHGNFGNSYISYWAYWGQGTLVTVSSGGGGSGGGGSGGGGSQTVVTQEPSLTVSPGGTVTLTCGSSTGAVTSGNYPNWVQQKPGQAPRGLIGGTKFLAPGTPARFSGSLLGGKAALTLSGVQPEDEAEYYCVLWYSNRWVFGGGTKLTVLGGGGDKTHTCPPCPAPELLGGPSVFLFPPKPKDTLMISRTPEVTCVVVDVSHEDPEVKFNWYVDGVEVHNAKTKPCEEQYGSTYRCVSVLTVLHQDWLNGKEYKCKVSNKALPAPIEKTISKAKGQPREPQVYTLPPSREEMTKNQVSLTCLVKGFYPSDIAVEWESNGQPENNYKTTPPVLDSDGSFFLYSKLTVDKSRWQQGNVFSCSVMHEALHNHYTQKSLSLSPGKGGGGSGGGGSGGGGSGGGGSGGGGSGGGGSDKTHTCPPCPAPELLGGPSVFLFPPKPKDTLMISRTPEVTCVVVDVSHEDPEVKFNWYVDGVEVHNAKTKPCEEQYGSTYRCVSVLTVLHQDWLNGKEYKCKVSNKALPAPIEKTISKAKGQPREPQVYTLPPSREEMTKNQVSLTCLVKGFYPSDIAVEWESNGQPENNYKTTPPVLDSDGSFFLYSKLTVDKSRWQQGNVFSCSVMHEALHNHYTQKSLSLSPGK

SEQ ID NO: 1376 - protein, 989 aa, Artificial Sequence
  Synthetic peptide
DIVMTQSPLSLPVTPGEPASISCRSSQSLLHKNHFNYLDWYLQKPGQSPQLLIYLGSNRASGVPDRFSGSGSGTDFTLKISRVEAEDVGVYYCMQALQTPFTFGCGTKVEIKGGGGSGGGGSGGGGSQVQLVESGGGVVQPGRSLRLSCAASGFTFSSYGIHWVRQAPGKCLEWVALTSYEGGNKYYAESVKGRFTISRDNSKNTLYLQMNSLRAEDTAVYYCAKDRGTIFGDYGMDVWGQGTTVTVSSGGGGSEVQLVESGGGLVQPGGSLKLSCAASGFTFNKYAMNWVRQAPGKGLEWVARIRSKYNNYATYYADSVKDRFTISRDDSKNTAYLQMNNLKTEDTAVYYCVRHGNFGNSYISYWAYWGQGTLVTVSSGGGGSGGGGSGGGGSQTVVTQEPSLTVSPGGTVTLTCGSSTGAVTSGNYPNWVQQKPGQAPRGLIGGTKFLAPGTPARFSGSLLGGKAALTLSGVQPEDEAEYYCVLWYSNRWVFGGGTKLTVLGGGGDKTHTCPPCPAPELLGGPSVFLFPPKPKDTLMISRTPEVTCVVVDVSHEDPEVKFNWYVDGVEVHNAKTKPCEEQYGSTYRCVSVLTVLHQDWLNGKEYKCKVSNKALPAPIEKTISKAKGQPREPQVYTLPPSREEMTKNQVSLTCLVKGFYPSDIAVEWESNGQPENNYKTTPPVLDSDGSFFLYSKLTVDKSRWQQGNVFSCSVMHEALHNHYTQKSLSLSPGGGGSGGGGSGGGGSGGGGSGGGGSGGGGSDKTHTCPPCPAPELLGGPSVFLFPPKPKDTLMISRTPEVTCVVVDVSHEDPEVKFNWYVDGVEVHNAKTKPCEEQYGSTYRCVSVLTVLHQDWLNGKEYKCKVSNKALPAPIEKTISKAKGQPREPQVYTLPPSREEMTKNQVSLTCLVKGFYPSDIAVEWESNGQPENNYKTTPPVLDSDGSFFLYSKLTVDKSRWQQGNVFSCSVMHEALHNHYTQKSLSLSPGK

SEQ ID NO: 1377 - protein, 5 aa, Artificial Sequence
  Synthetic peptide
NYGMH

SEQ ID NO: 1378 - protein, 17 aa, Artificial Sequence
  Synthetic peptide
VMSWEGSNKYYAEPVKG

SEQ ID NO: 1379 - protein, 13 aa, Artificial Sequence
  Synthetic peptide
DRGTIFGYYGMDV

SEQ ID NO: 1380 - protein, 16 aa, Artificial Sequence
  Synthetic peptide
RSSQSLLHKNNFNYLD

SEQ ID NO: 1381 - protein, 7 aa, Artificial Sequence
  Synthetic peptide
LGSNRAS

SEQ ID NO: 1382 - protein, 9 aa, Artificial Sequence
  Synthetic peptide
MQALQTPLT

SEQ ID NO: 1383 - protein, 122 aa, Artificial Sequence
  Synthetic peptide
QVQLVESGGGVVQPGRSLRLSCEASGFIVSNYGMHWVRQAPGKCLEWVAVMSWEGSNKYYAEPVKGRFTISRDKSKNTLSLQMSSLRAEDTALYYCARDRGTIFGYYGMDVWGQGTTVTVSS

SEQ ID NO: 1384 - protein, 112 aa, Artificial Sequence
  Synthetic peptide
DIVMTQSPLSLPVTPGEPASISCRSSQSLLHKNNFNYLDWYLQKPGQSPQLLIYLGSNRASGVPDRFSGSGSGTDFTLKISRVEAEDVGVYYCMQALQTPLTFACGTKVEIK

SEQ ID NO: 1385 - protein, 249 aa, Artificial Sequence
  Synthetic peptide
DIVMTQSPLSLPVTPGEPASISCRSSQSLLHKNNFNYLDWYLQKPGQSPQLLIYLGSNRASGVPDRFSGSGSGTDFTLKISRVEAEDVGVYYCMQALQTPLTFACGTKVEIKGGGGSGGGGSGGGGSQVQLVESGGGVVQPGRSLRLSCEASGFIVSNYGMHWVRQAPGKCLEWVAVMSWEGSNKYYAEPVKGRFTISRDKSKNTLSLQMSSLRAEDTALYYCARDRGTIFGYYGMDVWGQGTTVTVSS

SEQ ID NO: 1386 - protein, 503 aa, Artificial Sequence
  Synthetic peptide
DIVMTQSPLSLPVTPGEPASISCRSSQSLLHKNNFNYLDWYLQKPGQSPQLLIYLGSNRASGVPDRFSGSGSGTDFTLKISRVEAEDVGVYYCMQALQTPLTFACGTKVEIKGGGGSGGGGSGGGGSQVQLVESGGGVVQPGRSLRLSCEASGFIVSNYGMHWVRQAPGKCLEWVAVMSWEGSNKYYAEPVKGRFTISRDKSKNTLSLQMSSLRAEDTALYYCARDRGTIFGYYGMDVWGQGTTVTVSSGGGGSEVQLVESGGGLVQPGGSLKLSCAASGFTFNKYAMNWVRQAPGKGLEWVARIRSKYNNYATYYADSVKDRFTISRDDSKNTAYLQMNNLKTEDTAVYYCVRHGNFGNSYISYWAYWGQGTLVTVSSGGGGSGGGGSGGGGSQTVVTQEPSLTVSPGGTVTLTCGSSTGAVTSGNYPNWVQQKPGQAPRGLIGGTKFLAPGTPARFSGSLLGGKAALTLSGVQPEDEAEYYCVLWYSNRWVFGGGTKLTVL

SEQ ID NO: 1387 - protein, 991 aa, Artificial Sequence
  Synthetic peptide
DIVMTQSPLSLPVTPGEPASISCRSSQSLLHKNNFNYLDWYLQKPGQSPQLLIYLGSNRASGVPDRFSGSGSGTDFTLKISRVEAEDVGVYYCMQALQTPLTFACGTKVEIKGGGGSGGGGSGGGGSQVQLVESGGGVVQPGRSLRLSCEASGFIVSNYGMHWVRQAPGKCLEWVAVMSWEGSNKYYAEPVKGRFTISRDKSKNTLSLQMSSLRAEDTALYYCARDRGTIFGYYGMDVWGQGTTVTVSSGGGGSEVQLVESGGGLVQPGGSLKLSCAASGFTFNKYAMNWVRQAPGKGLEWVARIRSKYNNYATYYADSVKDRFTISRDDSKNTAYLQMNNLKTEDTAVYYCVRHGNFGNSYISYWAYWGQGTLVTVSSGGGGSGGGGSGGGGSQTVVTQEPSLTVSPGGTVTLTCGSSTGAVTSGNYPNWVQQKPGQAPRGLIGGTKFLAPGTPARFSGSLLGGKAALTLSGVQPEDEAEYYCVLWYSNRWVFGGGTKLTVLGGGGDKTHTCPPCPAPELLGGPSVFLFPPKPKDTLMISRTPEVTCVVVDVSHEDPEVKFNWYVDGVEVHNAKTKPCEEQYGSTYRCVSVLTVLHQDWLNGKEYKCKVSNKALPAPIEKTISKAKGQPREPQVYTLPPSREEMTKNQVSLTCLVKGFYPSDIAVEWESNGQPENNYKTTPPVLDSDGSFFLYSKLTVDKSRWQQGNVFSCSVMHEALHNHYTQKSLSLSPGKGGGGSGGGGSGGGGSGGGGSGGGGSGGGGSDKTHTCPPCPAPELLGGPSVFLFPPKPKDTLMISRTPEVTCVVVDVSHEDPEVKFNWYVDGVEVHNAKTKPCEEQYGSTYRCVSVLTVLHQDWLNGKEYKCKVSNKALPAPIEKTISKAKGQPREPQVYTLPPSREEMTKNQVSLTCLVKGFYPSDIAVEWESNGQPENNYKTTPPVLDSDGSFFLYSKLTVDKSRWQQGNVFSCSVMHEALHNHYTQKSLSLSPGK

SEQ ID NO: 1388 - protein, 989 aa, Artificial Sequence
  Synthetic peptide
DIVMTQSPLSLPVTPGEPASISCRSSQSLLHKNNFNYLDWYLQKPGQSPQLLIYLGSNRASGVPDRFSGSGSGTDFTLKISRVEAEDVGVYYCMQALQTPLTFACGTKVEIKGGGGSGGGGSGGGGSQVQLVESGGGVVQPGRSLRLSCEASGFIVSNYGMHWVRQAPGKCLEWVAVMSWEGSNKYYAEPVKGRFTISRDKSKNTLSLQMSSLRAEDTALYYCARDRGTIFGYYGMDVWGQGTTVTVSSGGGGSEVQLVESGGGLVQPGGSLKLSCAASGFTFNKYAMNWVRQAPGKGLEWVARIRSKYNNYATYYADSVKDRFTISRDDSKNTAYLQMNNLKTEDTAVYYCVRHGNFGNSYISYWAYWGQGTLVTVSSGGGGSGGGGSGGGGSQTVVTQEPSLTVSPGGTVTLTCGSSTGAVTSGNYPNWVQQKPGQAPRGLIGGTKFLAPGTPARFSGSLLGGKAALTLSGVQPEDEAEYYCVLWYSNRWVFGGGTKLTVLGGGGDKTHTCPPCPAPELLGGPSVFLFPPKPKDTLMISRTPEVTCVVVDVSHEDPEVKFNWYVDGVEVHNAKTKPCEEQYGSTYRCVSVLTVLHQDWLNGKEYKCKVSNKALPAPIEKTISKAKGQPREPQVYTLPPSREEMTKNQVSLTCLVKGFYPSDIAVEWESNGQPENNYKTTPPVLDSDGSFFLYSKLTVDKSRWQQGNVFSCSVMHEALHNHYTQKSLSLSPGGGGSGGGGSGGGGSGGGGSGGGGSGGGGSDKTHTCPPCPAPELLGGPSVFLFPPKPKDTLMISRTPEVTCVVVDVSHEDPEVKFNWYVDGVEVHNAKTKPCEEQYGSTYRCVSVLTVLHQDWLNGKEYKCKVSNKALPAPIEKTISKAKGQPREPQVYTLPPSREEMTKNQVSLTCLVKGFYPSDIAVEWESNGQPENNYKTTPPVLDSDGSFFLYSKLTVDKSRWQQGNVFSCSVMHEALHNHYTQKSLSLSPGK

SEQ ID NO: 1389 - protein, 5 aa, Artificial Sequence
  Synthetic peptide
SYGMH

SEQ ID NO: 1390 - protein, 17 aa, Artificial Sequence
  Synthetic peptide
VISYEGSNKYYAESVKG

SEQ ID NO: 1391 - protein, 13 aa, Artificial Sequence
  Synthetic peptide
DRGTIFGNYGLEV

SEQ ID NO: 1392 - protein, 16 aa, Artificial Sequence
  Synthetic peptide
RSSQSLLHGNRFNYLD

SEQ ID NO: 1393 - protein, 7 aa, Artificial Sequence
  Synthetic peptide
LGSNRAS

SEQ ID NO: 1394 - protein, 9 aa, Artificial Sequence
  Synthetic peptide
MQALQTPFT

SEQ ID NO: 1395 - protein, 122 aa, Artificial Sequence
  Synthetic peptide
QVQLVESGGGVVQPGRSLRLSCAASGFTFSSYGMHWVRQAPGKCLEWVAVISYEGSNKYYAESVKGRFTISRDNSKNTLYLQMNSLRDEDTAVYYCARDRGTIFGNYGLEVWGQGTTVTVSS

SEQ ID NO: 1396 - protein, 112 aa, Artificial Sequence
  Synthetic peptide
DIVMTQSPLSLPVISGEPASISCRSSQSLLHGNRFNYLDWYLQKPGQSPQLLIYLGSNRASGVPDRFSGSGSGTDFTLKISRVEAEDVGVYYCMQALQTPFTFGCGTKVDIK

SEQ ID NO: 1397 - protein, 249 aa, Artificial Sequence
  Synthetic peptide
DIVMTQSPLSLPVISGEPASISCRSSQSLLHGNRFNYLDWYLQKPGQSPQLLIYLGSNRASGVPDRFSGSGSGTDFTLKISRVEAEDVGVYYCMQALQTPFTFGCGTKVDIKGGGGSGGGGSGGGGSQVQLVESGGGVVQPGRSLRLSCAASGFTFSSYGMHWVRQAPGKCLEWVAVISYEGSNKYYAESVKGRFTISRDNSKNTLYLQMNSLRDEDTAVYYCARDRGTIFGNYGLEVWGQGTTVTVSS

SEQ ID NO: 1398 - protein, 503 aa, Artificial Sequence
  Synthetic peptide
DIVMTQSPLSLPVISGEPASISCRSSQSLLHGNRFNYLDWYLQKPGQSPQLLIYLGSNRASGVPDRFSGSGSGTDFTLKISRVEAEDVGVYYCMQALQTPFTFGCGTKVDIKGGGGSGGGGSGGGGSQVQLVESGGGVVQPGRSLRLSCAASGFTFSSYGMHWVRQAPGKCLEWVAVISYEGSNKYYAESVKGRFTISRDNSKNTLYLQMNSLRDEDTAVYYCARDRGTIFGNYGLEVWGQGTTVTVSSGGGGSEVQLVESGGGLVQPGGSLKLSCAASGFTFNKYAMNWVRQAPGKGLEWVARIRSKYNNYATYYADSVKDRFTISRDDSKNTAYLQMNNLKTEDTAVYYCVRHGNFGNSYISYWAYWGQGTLVTVSSGGGGSGGGGSGGGGSQTVVTQEPSLTVSPGGTVTLTCGSSTGAVTSGNYPNWVQQKPGQAPRGLIGGTKFLAPGTPARFSGSLLGGKAALTLSGVQPEDEAEYYCVLWYSNRWVFGGGTKLTVL

SEQ ID NO: 1399 - protein, 991 aa, Artificial Sequence
  Synthetic peptide
DIVMTQSPLSLPVISGEPASISCRSSQSLLHGNRFNYLDWYLQKPGQSPQLLIYLGSNRASGVPDRFSGSGSGTDFTLKISRVEAEDVGVYYCMQALQTPFTFGCGTKVDIKGGGGSGGGGSGGGGSQVQLVESGGGVVQPGRSLRLSCAASGFTFSSYGMHWVRQAPGKCLEWVAVISYEGSNKYYAESVKGRFTISRDNSKNTLYLQMNSLRDEDTAVYYCARDRGTIFGNYGLEVWGQGTTVTVSSGGGGSEVQLVESGGGLVQPGGSLKLSCAASGFTFNKYAMNWVRQAPGKGLEWVARIRSKYNNYATYYADSVKDRFTISRDDSKNTAYLQMNNLKTEDTAVYYCVRHGNFGNSYISYWAYWGQGTLVTVSSGGGGSGGGGSGGGGSQTVVTQEPSLTVSPGGTVTLTCGSSTGAVTSGNYPNWVQQKPGQAPRGLIGGTKFLAPGTPARFSGSLLGGKAALTLSGVQPEDEAEYYCVLWYSNRWVFGGGTKLTVLGGGGDKTHTCPPCPAPELLGGPSVFLFPPKPKDTLMISRTPEVTCVVVDVSHEDPEVKFNWYVDGVEVHNAKTKPCEEQYGSTYRCVSVLTVLHQDWLNGKEYKCKVSNKALPAPIEKTISKAKGQPREPQVYTLPPSREEMTKNQVSLTCLVKGFYPSDIAVEWESNGQPENNYKTTPPVLDSDGSFFLYSKLTVDKSRWQQGNVFSCSVMHEALHNHYTQKSLSLSPGKGGGGSGGGGSGGGGSGGGGSGGGGSGGGGSDKTHTCPPCPAPELLGGPSVFLFPPKPKDTLMISRTPEVTCVVVDVSHEDPEVKFNWYVDGVEVHNAKTKPCEEQYGSTYRCVSVLTVLHQDWLNGKEYKCKVSNKALPAPIEKTISKAKGQPREPQVYTLPPSREEMTKNQVSLTCLVKGFYPSDIAVEWESNGQPENNYKTTPPVLDSDGSFFLYSKLTVDKSRWQQGNVFSCSVMHEALHNHYTQKSLSLSPGK

SEQ ID NO: 1400 - protein, 989 aa, Artificial Sequence
  Synthetic peptide
DIVMTQSPLSLPVISGEPASISCRSSQSLLHGNRFNYLDWYLQKPGQSPQLLIYLGSNRASGVPDRFSGSGSGTDFTLKISRVEAEDVGVYYCMQALQTPFTFGCGTKVDIKGGGGSGGGGSGGGGSQVQLVESGGGVVQPGRSLRLSCAASGFTFSSYGMHWVRQAPGKCLEWVAVISYEGSNKYYAESVKGRFTISRDNSKNTLYLQMNSLRDEDTAVYYCARDRGTIFGNYGLEVWGQGTTVTVSSGGGGSEVQLVESGGGLVQPGGSLKLSCAASGFTFNKYAMNWVRQAPGKGLEWVARIRSKYNNYATYYADSVKDRFTISRDDSKNTAYLQMNNLKTEDTAVYYCVRHGNFGNSYISYWAYWGQGTLVTVSSGGGGSGGGGSGGGGSQTVVTQEPSLTVSPGGTVTLTCGSSTGAVTSGNYPNWVQQKPGQAPRGLIGGTKFLAPGTPARFSGSLLGGKAALTLSGVQPEDEAEYYCVLWYSNRWVFGGGTKLTVLGGGGDKTHTCPPCPAPELLGGPSVFLFPPKPKDTLMISRTPEVTCVVVDVSHEDPEVKFNWYVDGVEVHNAKTKPCEEQYGSTYRCVSVLTVLHQDWLNGKEYKCKVSNKALPAPIEKTISKAKGQPREPQVYTLPPSREEMTKNQVSLTCLVKGFYPSDIAVEWESNGQPENNYKTTPPVLDSDGSFFLYSKLTVDKSRWQQGNVFSCSVMHEALHNHYTQKSLSLSPGGGGSGGGGSGGGGSGGGGSGGGGSGGGGSDKTHTCPPCPAPELLGGPSVFLFPPKPKDTLMISRTPEVTCVVVDVSHEDPEVKFNWYVDGVEVHNAKTKPCEEQYGSTYRCVSVLTVLHQDWLNGKEYKCKVSNKALPAPIEKTISKAKGQPREPQVYTLPPSREEMTKNQVSLTCLVKGFYPSDIAVEWESNGQPENNYKTTPPVLDSDGSFFLYSKLTVDKSRWQQGNVFSCSVMHEALHNHYTQKSLSLSPGK

SEQ ID NO: 1401 - protein, 5 aa, Artificial Sequence
  Synthetic peptide
SYGMH

SEQ ID NO: 1402 - protein, 17 aa, Artificial Sequence
  Synthetic peptide
VISYEGSNKYYAESVKG

SEQ ID NO: 1403 - protein, 13 aa, Artificial Sequence
  Synthetic peptide
DRGTIFGNYGLEV

SEQ ID NO: 1404 - protein, 16 aa, Artificial Sequence
  Synthetic peptide
RSSQSLLHKNAFNYLD

SEQ ID NO: 1405 - protein, 7 aa, Artificial Sequence
  Synthetic peptide
LGSNRAS

SEQ ID NO: 1406 - protein, 9 aa, Artificial Sequence
  Synthetic peptide
MQALQTPFT

SEQ ID NO: 1407 - protein, 122 aa, Artificial Sequence; identical to SEQ ID NO: 1395
  Synthetic peptide

SEQ ID NO: 1408 - protein, 112 aa, Artificial Sequence
  Synthetic peptide
DIVMTQSPLSLPVISGEPASISCRSSQSLLHKNAFNYLDWYLQKPGQSPQLLIYLGSNRASGVPDRFSGSGSGTDFTLKISRVEAEDVGVYYCMQALQTPFTFGCGTKVDIK

SEQ ID NO: 1409 - protein, 249 aa, Artificial Sequence
  Synthetic peptide
DIVMTQSPLSLPVISGEPASISCRSSQSLLHKNAFNYLDWYLQKPGQSPQLLIYLGSNRASGVPDRFSGSGSGTDFTLKISRVEAEDVGVYYCMQALQTPFTFGCGTKVDIKGGGGSGGGGSGGGGSQVQLVESGGGVVQPGRSLRLSCAASGFTFSSYGMHWVRQAPGKCLEWVAVISYEGSNKYYAESVKGRFTISRDNSKNTLYLQMNSLRDEDTAVYYCARDRGTIFGNYGLEVWGQGTTVTVSS

SEQ ID NO: 1410 - protein, 503 aa, Artificial Sequence
  Synthetic peptide
DIVMTQSPLSLPVISGEPASISCRSSQSLLHKNAFNYLDWYLQKPGQSPQLLIYLGSNRASGVPDRFSGSGSGTDFTLKISRVEAEDVGVYYCMQALQTPFTFGCGTKVDIKGGGGSGGGGSGGGGSQVQLVESGGGVVQPGRSLRLSCAASGFTFSSYGMHWVRQAPGKCLEWVAVISYEGSNKYYAESVKGRFTISRDNSKNTLYLQMNSLRDEDTAVYYCARDRGTIFGNYGLEVWGQGTTVTVSSGGGGSEVQLVESGGGLVQPGGSLKLSCAASGFTFNKYAMNWVRQAPGKGLEWVARIRSKYNNYATYYADSVKDRFTISRDDSKNTAYLQMNNLKTEDTAVYYCVRHGNFGNSYISYWAYWGQGTLVTVSSGGGGSGGGGSGGGGSQTVVTQEPSLTVSPGGTVTLTCGSSTGAVTSGNYPNWVQQKPGQAPRGLIGGTKFLAPGTPARFSGSLLGGKAALTLSGVQPEDEAEYYCVLWYSNRWVFGGGTKLTVL

SEQ ID NO: 1411 - protein, 991 aa, Artificial Sequence
  Synthetic peptide
DIVMTQSPLSLPVISGEPASISCRSSQSLLHKNAFNYLDWYLQKPGQSPQLLIYLGSNRASGVPDRFSGSGSGTDFTLKISRVEAEDVGVYYCMQALQTPFTFGCGTKVDIKGGGGSGGGGSGGGGSQVQLVESGGGVVQPGRSLRLSCAASGFTFSSYGMHWVRQAPGKCLEWVAVISYEGSNKYYAESVKGRFTISRDNSKNTLYLQMNSLRDEDTAVYYCARDRGTIFGNYGLEVWGQGTTVTVSSGGGGSEVQLVESGGGLVQPGGSLKLSCAASGFTFNKYAMNWVRQAPGKGLEWVARIRSKYNNYATYYADSVKDRFTISRDDSKNTAYLQMNNLKTEDTAVYYCVRHGNFGNSYISYWAYWGQGTLVTVSSGGGGSGGGGSGGGGSQTVVTQEPSLTVSPGGTVTLTCGSSTGAVTSGNYPNWVQQKPGQAPRGLIGGTKFLAPGTPARFSGSLLGGKAALTLSGVQPEDEAEYYCVLWYSNRWVFGGGTKLTVLGGGGDKTHTCPPCPAPELLGGPSVFLFPPKPKDTLMISRTPEVTCVVVDVSHEDPEVKFNWYVDGVEVHNAKTKPCEEQYGSTYRCVSVLTVLHQDWLNGKEYKCKVSNKALPAPIEKTISKAKGQPREPQVYTLPPSREEMTKNQVSLTCLVKGFYPSDIAVEWESNGQPENNYKTTPPVLDSDGSFFLYSKLTVDKSRWQQGNVFSCSVMHEALHNHYTQKSLSLSPGKGGGGSGGGGSGGGGSGGGGSGGGGSGGGGSDKTHTCPPCPAPELLGGPSVFLFPPKPKDTLMISRTPEVTCVVVDVSHEDPEVKFNWYVDGVEVHNAKTKPCEEQYGSTYRCVSVLTVLHQDWLNGKEYKCKVSNKALPAPIEKTISKAKGQPREPQVYTLPPSREEMTKNQVSLTCLVKGFYPSDIAVEWESNGQPENNYKTTPPVLDSDGSFFLYSKLTVDKSRWQQGNVFSCSVMHEALHNHYTQKSLSLSPGK

SEQ ID NO: 1412 - protein, 989 aa, Artificial Sequence
  Synthetic peptide
DIVMTQSPLSLPVISGEPASISCRSSQSLLHKNAFNYLDWYLQKPGQSPQLLIYLGSNRASGVPDRFSGSGSGTDFTLKISRVEAEDVGVYYCMQALQTPFTFGCGTKVDIKGGGGSGGGGSGGGGSQVQLVESGGGVVQPGRSLRLSCAASGFTFSSYGMHWVRQAPGKCLEWVAVISYEGSNKYYAESVKGRFTISRDNSKNTLYLQMNSLRDEDTAVYYCARDRGTIFGNYGLEVWGQGTTVTVSSGGGGSEVQLVESGGGLVQPGGSLKLSCAASGFTFNKYAMNWVRQAPGKGLEWVARIRSKYNNYATYYADSVKDRFTISRDDSKNTAYLQMNNLKTEDTAVYYCVRHGNFGNSYISYWAYWGQGTLVTVSSGGGGSGGGGSGGGGSQTVVTQEPSLTVSPGGTVTLTCGSSTGAVTSGNYPNWVQQKPGQAPRGLIGGTKFLAPGTPARFSGSLLGGKAALTLSGVQPEDEAEYYCVLWYSNRWVFGGGTKLTVLGGGGDKTHTCPPCPAPELLGGPSVFLFPPKPKDTLMISRTPEVTCVVVDVSHEDPEVKFNWYVDGVEVHNAKTKPCEEQYGSTYRCVSVLTVLHQDWLNGKEYKCKVSNKALPAPIEKTISKAKGQPREPQVYTLPPSREEMTKNQVSLTCLVKGFYPSDIAVEWESNGQPENNYKTTPPVLDSDGSFFLYSKLTVDKSRWQQGNVFSCSVMHEALHNHYTQKSLSLSPGGGGSGGGGSGGGGSGGGGSGGGGSGGGGSDKTHTCPPCPAPELLGGPSVFLFPPKPKDTLMISRTPEVTCVVVDVSHEDPEVKFNWYVDGVEVHNAKTKPCEEQYGSTYRCVSVLTVLHQDWLNGKEYKCKVSNKALPAPIEKTISKAKGQPREPQVYTLPPSREEMTKNQVSLTCLVKGFYPSDIAVEWESNGQPENNYKTTPPVLDSDGSFFLYSKLTVDKSRWQQGNVFSCSVMHEALHNHYTQKSLSLSPGK

SEQ ID NO: 1413 - protein, 5 aa, Artificial Sequence
  Synthetic peptide
SYGMH

SEQ ID NO: 1414 - protein, 17 aa, Artificial Sequence
  Synthetic peptide
VISYEGSNKYYAESVKG

SEQ ID NO: 1415 - protein, 13 aa, Artificial Sequence
  Synthetic peptide
DRGTIFGNYGLEV

SEQ ID NO: 1416 - protein, 16 aa, Artificial Sequence
  Synthetic peptide
RSSQSLLHKNKWNYLD

SEQ ID NO: 1417 - protein, 7 aa, Artificial Sequence
  Synthetic peptide
LGSNRAS

SEQ ID NO: 1418 - protein, 9 aa, Artificial Sequence
  Synthetic peptide
MQALQTPFT

SEQ ID NO: 1419 - protein, 122 aa, Artificial Sequence; identical to SEQ ID NO: 1395
  Synthetic peptide

SEQ ID NO: 1420 - protein, 112 aa, Artificial Sequence
  Synthetic peptide
DIVMTQSPLSLPVISGEPASISCRSSQSLLHKNKWNYLDWYLQKPGQSPQLLIYLGSNRASGVPDRFSGSGSGTDFTLKISRVEAEDVGVYYCMQALQTPFTFGCGTKVDIK

SEQ ID NO: 1421 - protein, 249 aa, Artificial Sequence
  Synthetic peptide
DIVMTQSPLSLPVISGEPASISCRSSQSLLHKNKWNYLDWYLQKPGQSPQLLIYLGSNRASGVPDRFSGSGSGTDFTLKISRVEAEDVGVYYCMQALQTPFTFGCGTKVDIKGGGGSGGGGSGGGGSQVQLVESGGGVVQPGRSLRLSCAASGFTFSSYGMHWVRQAPGKCLEWVAVISYEGSNKYYAESVKGRFTISRDNSKNTLYLQMNSLRDEDTAVYYCARDRGTIFGNYGLEVWGQGTTVTVSS

SEQ ID NO: 1422 - protein, 503 aa, Artificial Sequence
  Synthetic peptide
DIVMTQSPLSLPVISGEPASISCRSSQSLLHKNKWNYLDWYLQKPGQSPQLLIYLGSNRASGVPDRFSGSGSGTDFTLKISRVEAEDVGVYYCMQALQTPFTFGCGTKVDIKGGGGSGGGGSGGGGSQVQLVESGGGVVQPGRSLRLSCAASGFTFSSYGMHWVRQAPGKCLEWVAVISYEGSNKYYAESVKGRFTISRDNSKNTLYLQMNSLRDEDTAVYYCARDRGTIFGNYGLEVWGQGTTVTVSSGGGGSEVQLVESGGGLVQPGGSLKLSCAASGFTFNKYAMNWVRQAPGKGLEWVARIRSKYNNYATYYADSVKDRFTISRDDSKNTAYLQMNNLKTEDTAVYYCVRHGNFGNSYISYWAYWGQGTLVTVSSGGGGSGGGGSGGGGSQTVVTQEPSLTVSPGGTVTLTCGSSTGAVTSGNYPNWVQQKPGQAPRGLIGGTKFLAPGTPARFSGSLLGGKAALTLSGVQPEDEAEYYCVLWYSNRWVFGGGTKLTVL

SEQ ID NO: 1423 - protein, 991 aa, Artificial Sequence
  Synthetic peptide
DIVMTQSPLSLPVISGEPASISCRSSQSLLHKNKWNYLDWYLQKPGQSPQLLIYLGSNRASGVPDRFSGSGSGTDFTLKISRVEAEDVGVYYCMQALQTPFTFGCGTKVDIKGGGGSGGGGSGGGGSQVQLVESGGGVVQPGRSLRLSCAASGFTFSSYGMHWVRQAPGKCLEWVAVISYEGSNKYYAESVKGRFTISRDNSKNTLYLQMNSLRDEDTAVYYCARDRGTIFGNYGLEVWGQGTTVTVSSGGGGSEVQLVESGGGLVQPGGSLKLSCAASGFTFNKYAMNWVRQAPGKGLEWVARIRSKYNNYATYYADSVKDRFTISRDDSKNTAYLQMNNLKTEDTAVYYCVRHGNFGNSYISYWAYWGQGTLVTVSSGGGGSGGGGSGGGGSQTVVTQEPSLTVSPGGTVTLTCGSSTGAVTSGNYPNWVQQKPGQAPRGLIGGTKFLAPGTPARFSGSLLGGKAALTLSGVQPEDEAEYYCVLWYSNRWVFGGGTKLTVLGGGGDKTHTCPPCPAPELLGGPSVFLFPPKPKDTLMISRTPEVTCVVVDVSHEDPEVKFNWYVDGVEVHNAKTKPCEEQYGSTYRCVSVLTVLHQDWLNGKEYKCKVSNKALPAPIEKTISKAKGQPREPQVYTLPPSREEMTKNQVSLTCLVKGFYPSDIAVEWESNGQPENNYKTTPPVLDSDGSFFLYSKLTVDKSRWQQGNVFSCSVMHEALHNHYTQKSLSLSPGKGGGGSGGGGSGGGGSGGGGSGGGGSGGGGSDKTHTCPPCPAPELLGGPSVFLFPPKPKDTLMISRTPEVTCVVVDVSHEDPEVKFNWYVDGVEVHNAKTKPCEEQYGSTYRCVSVLTVLHQDWLNGKEYKCKVSNKALPAPIEKTISKAKGQPREPQVYTLPPSREEMTKNQVSLTCLVKGFYPSDIAVEWESNGQPENNYKTTPPVLDSDGSFFLYSKLTVDKSRWQQGNVFSCSVMHEALHNHYTQKSLSLSPGK

SEQ ID NO: 1424 - protein, 989 aa, Artificial Sequence
  Synthetic peptide
DIVMTQSPLSLPVISGEPASISCRSSQSLLHKNKWNYLDWYLQKPGQSPQLLIYLGSNRASGVPDRFSGSGSGTDFTLKISRVEAEDVGVYYCMQALQTPFTFGCGTKVDIKGGGGSGGGGSGGGGSQVQLVESGGGVVQPGRSLRLSCAASGFTFSSYGMHWVRQAPGKCLEWVAVISYEGSNKYYAESVKGRFTISRDNSKNTLYLQMNSLRDEDTAVYYCARDRGTIFGNYGLEVWGQGTTVTVSSGGGGSEVQLVESGGGLVQPGGSLKLSCAASGFTFNKYAMNWVRQAPGKGLEWVARIRSKYNNYATYYADSVKDRFTISRDDSKNTAYLQMNNLKTEDTAVYYCVRHGNFGNSYISYWAYWGQGTLVTVSSGGGGSGGGGSGGGGSQTVVTQEPSLTVSPGGTVTLTCGSSTGAVTSGNYPNWVQQKPGQAPRGLIGGTKFLAPGTPARFSGSLLGGKAALTLSGVQPEDEAEYYCVLWYSNRWVFGGGTKLTVLGGGGDKTHTCPPCPAPELLGGPSVFLFPPKPKDTLMISRTPEVTCVVVDVSHEDPEVKFNWYVDGVEVHNAKTKPCEEQYGSTYRCVSVLTVLHQDWLNGKEYKCKVSNKALPAPIEKTISKAKGQPREPQVYTLPPSREEMTKNQVSLTCLVKGFYPSDIAVEWESNGQPENNYKTTPPVLDSDGSFFLYSKLTVDKSRWQQGNVFSCSVMHEALHNHYTQKSLSLSPGGGGSGGGGSGGGGSGGGGSGGGGSGGGGSDKTHTCPPCPAPELLGGPSVFLFPPKPKDTLMISRTPEVTCVVVDVSHEDPEVKFNWYVDGVEVHNAKTKPCEEQYGSTYRCVSVLTVLHQDWLNGKEYKCKVSNKALPAPIEKTISKAKGQPREPQVYTLPPSREEMTKNQVSLTCLVKGFYPSDIAVEWESNGQPENNYKTTPPVLDSDGSFFLYSKLTVDKSRWQQGNVFSCSVMHEALHNHYTQKSLSLSPGK

SEQ ID NO: 1425 - protein, 5 aa, Artificial Sequence
  Synthetic peptide
SYGMH

SEQ ID NO: 1426 - protein, 17 aa, Artificial Sequence
  Synthetic peptide
VISYEGSNKYYAESVKG

SEQ ID NO: 1427 - protein, 13 aa, Artificial Sequence
  Synthetic peptide
DRGTIFGNYGLEV

SEQ ID NO: 1428 - protein, 16 aa, Artificial Sequence
  Synthetic peptide
RSSQSLLHKNNFNYLD

SEQ ID NO: 1429 - protein, 7 aa, Artificial Sequence
  Synthetic peptide
LGSNRAS

SEQ ID NO: 1430 - protein, 9 aa, Artificial Sequence
  Synthetic peptide
MQALQTPFT

SEQ ID NO: 1431 - protein, 122 aa, Artificial Sequence; identical to SEQ ID NO: 1395
  Synthetic peptide

SEQ ID NO: 1432 - protein, 112 aa, Artificial Sequence
  Synthetic peptide
DIVMTQSPLSLPVISGEPASISCRSSQSLLHKNNFNYLDWYLQKPGQSPQLLIYLGSNRASGVPDRFSGSGSGTDFTLKISRVEAEDVGVYYCMQALQTPFTFGCGTKVDIK

SEQ ID NO: 1433 - protein, 249 aa, Artificial Sequence
  Synthetic peptide
DIVMTQSPLSLPVISGEPASISCRSSQSLLHKNNFNYLDWYLQKPGQSPQLLIYLGSNRASGVPDRFSGSGSGTDFTLKISRVEAEDVGVYYCMQALQTPFTFGCGTKVDIKGGGGSGGGGSGGGGSQVQLVESGGGVVQPGRSLRLSCAASGFTFSSYGMHWVRQAPGKCLEWVAVISYEGSNKYYAESVKGRFTISRDNSKNTLYLQMNSLRDEDTAVYYCARDRGTIFGNYGLEVWGQGTTVTVSS

SEQ ID NO: 1434 - protein, 503 aa, Artificial Sequence
  Synthetic peptide
DIVMTQSPLSLPVISGEPASISCRSSQSLLHKNNFNYLDWYLQKPGQSPQLLIYLGSNRASGVPDRFSGSGSGTDFTLKISRVEAEDVGVYYCMQALQTPFTFGCGTKVDIKGGGGSGGGGSGGGGSQVQLVESGGGVVQPGRSLRLSCAASGFTFSSYGMHWVRQAPGKCLEWVAVISYEGSNKYYAESVKGRFTISRDNSKNTLYLQMNSLRDEDTAVYYCARDRGTIFGNYGLEVWGQGTTVTVSSGGGGSEVQLVESGGGLVQPGGSLKLSCAASGFTFNKYAMNWVRQAPGKGLEWVARIRSKYNNYATYYADSVKDRFTISRDDSKNTAYLQMNNLKTEDTAVYYCVRHGNFGNSYISYWAYWGQGTLVTVSSGGGGSGGGGSGGGGSQTVVTQEPSLTVSPGGTVTLTCGSSTGAVTSGNYPNWVQQKPGQAPRGLIGGTKFLAPGTPARFSGSLLGGKAALTLSGVQPEDEAEYYCVLWYSNRWVFGGGTKLTVL

SEQ ID NO: 1435 - protein, 991 aa, Artificial Sequence
  Synthetic peptide
DIVMTQSPLSLPVISGEPASISCRSSQSLLHKNNFNYLDWYLQKPGQSPQLLIYLGSNRASGVPDRFSGSGSGTDFTLKISRVEAEDVGVYYCMQALQTPFTFGCGTKVDIKGGGGSGGGGSGGGGSQVQLVESGGGVVQPGRSLRLSCAASGFTFSSYGMHWVRQAPGKCLEWVAVISYEGSNKYYAESVKGRFTISRDNSKNTLYLQMNSLRDEDTAVYYCARDRGTIFGNYGLEVWGQGTTVTVSSGGGGSEVQLVESGGGLVQPGGSLKLSCAASGFTFNKYAMNWVRQAPGKGLEWVARIRSKYNNYATYYADSVKDRFTISRDDSKNTAYLQMNNLKTEDTAVYYCVRHGNFGNSYISYWAYWGQGTLVTVSSGGGGSGGGGSGGGGSQTVVTQEPSLTVSPGGTVTLTCGSSTGAVTSGNYPNWVQQKPGQAPRGLIGGTKFLAPGTPARFSGSLLGGKAALTLSGVQPEDEAEYYCVLWYSNRWVFGGGTKLTVLGGGGDKTHTCPPCPAPELLGGPSVFLFPPKPKDTLMISRTPEVTCVVVDVSHEDPEVKFNWYVDGVEVHNAKTKPCEEQYGSTYRCVSVLTVLHQDWLNGKEYKCKVSNKALPAPIEKTISKAKGQPREPQVYTLPPSREEMTKNQVSLTCLVKGFYPSDIAVEWESNGQPENNYKTTPPVLDSDGSFFLYSKLTVDKSRWQQGNVFSCSVMHEALHNHYTQKSLSLSPGKGGGGSGGGGSGGGGSGGGGSGGGGSGGGGSDKTHTCPPCPAPELLGGPSVFLFPPKPKDTLMISRTPEVTCVVVDVSHEDPEVKFNWYVDGVEVHNAKTKPCEEQYGSTYRCVSVLTVLHQDWLNGKEYKCKVSNKALPAPIEKTISKAKGQPREPQVYTLPPSREEMTKNQVSLTCLVKGFYPSDIAVEWESNGQPENNYKTTPPVLDSDGSFFLYSKLTVDKSRWQQGNVFSCSVMHEALHNHYTQKSLSLSPGK

SEQ ID NO: 1436 - protein, 989 aa, Artificial Sequence
  Synthetic peptide
DIVMTQSPLSLPVISGEPASISCRSSQSLLHKNNFNYLDWYLQKPGQSPQLLIYLGSNRASGVPDRFSGSGSGTDFTLKISRVEAEDVGVYYCMQALQTPFTFGCGTKVDIKGGGGSGGGGSGGGGSQVQLVESGGGVVQPGRSLRLSCAASGFTFSSYGMHWVRQAPGKCLEWVAVISYEGSNKYYAESVKGRFTISRDNSKNTLYLQMNSLRDEDTAVYYCARDRGTIFGNYGLEVWGQGTTVTVSSGGGGSEVQLVESGGGLVQPGGSLKLSCAASGFTFNKYAMNWVRQAPGKGLEWVARIRSKYNNYATYYADSVKDRFTISRDDSKNTAYLQMNNLKTEDTAVYYCVRHGNFGNSYISYWAYWGQGTLVTVSSGGGGSGGGGSGGGGSQTVVTQEPSLTVSPGGTVTLTCGSSTGAVTSGNYPNWVQQKPGQAPRGLIGGTKFLAPGTPARFSGSLLGGKAALTLSGVQPEDEAEYYCVLWYSNRWVFGGGTKLTVLGGGGDKTHTCPPCPAPELLGGPSVFLFPPKPKDTLMISRTPEVTCVVVDVSHEDPEVKFNWYVDGVEVHNAKTKPCEEQYGSTYRCVSVLTVLHQDWLNGKEYKCKVSNKALPAPIEKTISKAKGQPREPQVYTLPPSREEMTKNQVSLTCLVKGFYPSDIAVEWESNGQPENNYKTTPPVLDSDGSFFLYSKLTVDKSRWQQGNVFSCSVMHEALHNHYTQKSLSLSPGGGGSGGGGSGGGGSGGGGSGGGGSGGGGSDKTHTCPPCPAPELLGGPSVFLFPPKPKDTLMISRTPEVTCVVVDVSHEDPEVKFNWYVDGVEVHNAKTKPCEEQYGSTYRCVSVLTVLHQDWLNGKEYKCKVSNKALPAPIEKTISKAKGQPREPQVYTLPPSREEMTKNQVSLTCLVKGFYPSDIAVEWESNGQPENNYKTTPPVLDSDGSFFLYSKLTVDKSRWQQGNVFSCSVMHEALHNHYTQKSLSLSPGK

SEQ ID NO: 1437 - protein, 5 aa, Artificial Sequence
  Synthetic peptide
NYGMH

SEQ ID NO: 1438 - protein, 17 aa, Artificial Sequence
  Synthetic peptide
AIGWEGSNKYYAEPVKG

SEQ ID NO: 1439 - protein, 13 aa, Artificial Sequence
  Synthetic peptide
DRGTIFGYYGMDV

SEQ ID NO: 1440 - protein, 16 aa, Artificial Sequence
  Synthetic peptide
RSSQSLLHKNNFNYLD

SEQ ID NO: 1441 - protein, 7 aa, Artificial Sequence
  Synthetic peptide
LGSNRAS

SEQ ID NO: 1442 - protein, 9 aa, Artificial Sequence
  Synthetic peptide
MQALSEPLT

SEQ ID NO: 1443 - protein, 122 aa, Artificial Sequence; identical to SEQ ID NO: 1275
  Synthetic peptide

SEQ ID NO: 1444 - protein, 112 aa, Artificial Sequence
  Synthetic peptide
DIVMTQSPLSLPVTPGEPASISCRSSQSLLHKNNFNYLDWYLQKPGQSPQLLIYLGSNRASGVPDRFSGSGSGTDFTLKISRVEAEDVGVYYCMQALSEPLTFACGTKVEIK

SEQ ID NO: 1445 - protein, 249 aa, Artificial Sequence
  Synthetic peptide
DIVMTQSPLSLPVTPGEPASISCRSSQSLLHKNNFNYLDWYLQKPGQSPQLLIYLGSNRASGVPDRFSGSGSGTDFTLKISRVEAEDVGVYYCMQALSEPLTFACGTKVEIKGGGGSGGGGSGGGGSQVQLVESGGGVVQPGRSLRLSCEASGFIVSNYGMHWVRQAPGKCLEWVAAIGWEGSNKYYAEPVKGRFTISRDKSKNTLSLQMSSLRAEDTALYYCARDRGTIFGYYGMDVWGQGTTVTVSS

SEQ ID NO: 1446 - protein, 503 aa, Artificial Sequence
  Synthetic peptide
DIVMTQSPLSLPVTPGEPASISCRSSQSLLHKNNFNYLDWYLQKPGQSPQLLIYLGSNRASGVPDRFSGSGSGTDFTLKISRVEAEDVGVYYCMQALSEPLTFACGTKVEIKGGGGSGGGGSGGGGSQVQLVESGGGVVQPGRSLRLSCEASGFIVSNYGMHWVRQAPGKCLEWVAAIGWEGSNKYYAEPVKGRFTISRDKSKNTLSLQMSSLRAEDTALYYCARDRGTIFGYYGMDVWGQGTTVTVSSGGGGSEVQLVESGGGLVQPGGSLKLSCAASGFTFNKYAMNWVRQAPGKGLEWVARIRSKYNNYATYYADSVKDRFTISRDDSKNTAYLQMNNLKTEDTAVYYCVRHGNFGNSYISYWAYWGQGTLVTVSSGGGGSGGGGSGGGGSQTVVTQEPSLTVSPGGTVTLTCGSSTGAVTSGNYPNWVQQKPGQAPRGLIGGTKFLAPGTPARFSGSLLGGKAALTLSGVQPEDEAEYYCVLWYSNRWVFGGGTKLTVL

SEQ ID NO: 1447 - protein, 991 aa, Artificial Sequence
  Synthetic peptide
DIVMTQSPLSLPVTPGEPASISCRSSQSLLHKNNFNYLDWYLQKPGQSPQLLIYLGSNRASGVPDRFSGSGSGTDFTLKISRVEAEDVGVYYCMQALSEPLTFACGTKVEIKGGGGSGGGGSGGGGSQVQLVESGGGVVQPGRSLRLSCEASGFIVSNYGMHWVRQAPGKCLEWVAAIGWEGSNKYYAEPVKGRFTISRDKSKNTLSLQMSSLRAEDTALYYCARDRGTIFGYYGMDVWGQGTTVTVSSGGGGSEVQLVESGGGLVQPGGSLKLSCAASGFTFNKYAMNWVRQAPGKGLEWVARIRSKYNNYATYYADSVKDRFTISRDDSKNTAYLQMNNLKTEDTAVYYCVRHGNFGNSYISYWAYWGQGTLVTVSSGGGGSGGGGSGGGGSQTVVTQEPSLTVSPGGTVTLTCGSSTGAVTSGNYPNWVQQKPGQAPRGLIGGTKFLAPGTPARFSGSLLGGKAALTLSGVQPEDEAEYYCVLWYSNRWVFGGGTKLTVLGGGGDKTHTCPPCPAPELLGGPSVFLFPPKPKDTLMISRTPEVTCVVVDVSHEDPEVKFNWYVDGVEVHNAKTKPCEEQYGSTYRCVSVLTVLHQDWLNGKEYKCKVSNKALPAPIEKTISKAKGQPREPQVYTLPPSREEMTKNQVSLTCLVKGFYPSDIAVEWESNGQPENNYKTTPPVLDSDGSFFLYSKLTVDKSRWQQGNVFSCSVMHEALHNHYTQKSLSLSPGKGGGGSGGGGSGGGGSGGGGSGGGGSGGGGSDKTHTCPPCPAPELLGGPSVFLFPPKPKDTLMISRTPEVTCVVVDVSHEDPEVKFNWYVDGVEVHNAKTKPCEEQYGSTYRCVSVLTVLHQDWLNGKEYKCKVSNKALPAPIEKTISKAKGQPREPQVYTLPPSREEMTKNQVSLTCLVKGFYPSDIAVEWESNGQPENNYKTTPPVLDSDGSFFLYSKLTVDKSRWQQGNVFSCSVMHEALHNHYTQKSLSLSPGK

SEQ ID NO: 1448 - protein, 989 aa, Artificial Sequence
  Synthetic peptide
DIVMTQSPLSLPVTPGEPASISCRSSQSLLHKNNFNYLDWYLQKPGQSPQLLIYLGSNRASGVPDRFSGSGSGTDFTLKISRVEAEDVGVYYCMQALSEPLTFACGTKVEIKGGGGSGGGGSGGGGSQVQLVESGGGVVQPGRSLRLSCEASGFIVSNYGMHWVRQAPGKCLEWVAAIGWEGSNKYYAEPVKGRFTISRDKSKNTLSLQMSSLRAEDTALYYCARDRGTIFGYYGMDVWGQGTTVTVSSGGGGSEVQLVESGGGLVQPGGSLKLSCAASGFTFNKYAMNWVRQAPGKGLEWVARIRSKYNNYATYYADSVKDRFTISRDDSKNTAYLQMNNLKTEDTAVYYCVRHGNFGNSYISYWAYWGQGTLVTVSSGGGGSGGGGSGGGGSQTVVTQEPSLTVSPGGTVTLTCGSSTGAVTSGNYPNWVQQKPGQAPRGLIGGTKFLAPGTPARFSGSLLGGKAALTLSGVQPEDEAEYYCVLWYSNRWVFGGGTKLTVLGGGGDKTHTCPPCPAPELLGGPSVFLFPPKPKDTLMISRTPEVTCVVVDVSHEDPEVKFNWYVDGVEVHNAKTKPCEEQYGSTYRCVSVLTVLHQDWLNGKEYKCKVSNKALPAPIEKTISKAKGQPREPQVYTLPPSREEMTKNQVSLTCLVKGFYPSDIAVEWESNGQPENNYKTTPPVLDSDGSFFLYSKLTVDKSRWQQGNVFSCSVMHEALHNHYTQKSLSLSPGGGGSGGGGSGGGGSGGGGSGGGGSGGGGSDKTHTCPPCPAPELLGGPSVFLFPPKPKDTLMISRTPEVTCVVVDVSHEDPEVKFNWYVDGVEVHNAKTKPCEEQYGSTYRCVSVLTVLHQDWLNGKEYKCKVSNKALPAPIEKTISKAKGQPREPQVYTLPPSREEMTKNQVSLTCLVKGFYPSDIAVEWESNGQPENNYKTTPPVLDSDGSFFLYSKLTVDKSRWQQGNVFSCSVMHEALHNHYTQKSLSLSPGK

SEQ ID NO: 1449 - protein, 10 aa, Artificial Sequence
  Synthetic peptide
DKTHTCPPCP

SEQ ID NO: 1450 - protein, 12 aa, Artificial Sequence
  Synthetic peptide
ERKCCVECPPCP

SEQ ID NO: 1451 - protein, 16 aa, Artificial Sequence
  Synthetic peptide
ELKTPLDTTHTCPRCP

SEQ ID NO: 1452 - protein, 12 aa, Artificial Sequence
  Synthetic peptide
ESKYGPPCPSCP

SEQ ID NO: 1453 - protein, 994 aa, Artificial Sequence; identical to SEQ ID NO: 78
  Synthetic peptide

SEQ ID NO: 1454 - protein, 984 aa, Artificial Sequence
  Synthetic peptide
QVQLVESGGGVVQSGRSLRLSCAASGFTFRNYGMHWVRQAPGKCLEWVAVIWYDGSDKYYADSVRGRFTISRDNSKNTLYLQMNSLRAEDTAVYYCARDGYDILTGNPRDFDYWGQGTLVTVSSGGGGSGGGGSGGGGSDTVMTQTPLSSHVTLGQPASISCRSSQSLVHSDGNTYLSWLQQRPGQPPRLLIYRISRRFSGVPDRFSGSGAGTDFTLEISRVEAEDVGVYYCMQSTHVPRTFGCGTKVEIKSGGGGSEVQLVESGGGLVQPGGSLKLSCAASGFTFNKYAMNWVRQAPGKGLEWVARIRSKYNNYATYYADSVKDRFTISRDDSKNTAYLQMNNLKTEDTAVYYCVRHGNFGNSYISYWAYWGQGTLVTVSSGGGGSGGGGSGGGGSQTVVTQEPSLTVSPGGTVTLTCGSSTGAVTSGNYPNWVQQKPGQAPRGLIGGTKFLAPGTPARFSGSLLGGKAALTLSGVQPEDEAEYYCVLWYSNRWVFGGGTKLTVLGGGGDKTHTCPPCPAPELLGGPSVFLFPPKPKDTLMISRTPEVTCVVVDVSHEDPEVKFNWYVDGVEVHNAKTKPCEEQYGSTYRCVSVLTVLHQDWLNGKEYKCKVSNKALPAPIEKTISKAKGQPREPQVYTLPPSREEMTKNQVSLTCLVKGFYPSDIAVEWESNGQPENNYKTTPPVLDSDGSFFLYSKLTVDKSRWQQGNVFSCSVMHEALHNHYTQKSLSLSPGKGGGGSGGGGSGGGGSGGGGSGGGGSGGGGSAPELLGGPSVFLFPPKPKDTLMISRTPEVTCVVVDVSHEDPEVKFNWYVDGVEVHNAKTKPCEEQYGSTYRCVSVLTVLHQDWLNGKEYKCKVSNKALPAPIEKTISKAKGQPREPQVYTLPPSREEMTKNQVSLTCLVKGFYPSDIAVEWESNGQPENNYKTTPPVLDSDGSFFLYSKLTVDKSRWQQGNVFSCSVMHEALHNHYTQKSLSLSPGK

SEQ ID NO: 1455 - protein, 1004 aa, Artificial Sequence
  Synthetic peptide
QVQLVESGGGVVQSGRSLRLSCAASGFTFRNYGMHWVRQAPGKCLEWVAVIWYDGSDKYYADSVRGRFTISRDNSKNTLYLQMNSLRAEDTAVYYCARDGYDILTGNPRDFDYWGQGTLVTVSSGGGGSGGGGSGGGGSDTVMTQTPLSSHVTLGQPASISCRSSQSLVHSDGNTYLSWLQQRPGQPPRLLIYRISRRFSGVPDRFSGSGAGTDFTLEISRVEAEDVGVYYCMQSTHVPRTFGCGTKVEIKSGGGGSEVQLVESGGGLVQPGGSLKLSCAASGFTFNKYAMNWVRQAPGKGLEWVARIRSKYNNYATYYADSVKDRFTISRDDSKNTAYLQMNNLKTEDTAVYYCVRHGNFGNSYISYWAYWGQGTLVTVSSGGGGSGGGGSGGGGSQTVVTQEPSLTVSPGGTVTLTCGSSTGAVTSGNYPNWVQQKPGQAPRGLIGGTKFLAPGTPARFSGSLLGGKAALTLSGVQPEDEAEYYCVLWYSNRWVFGGGTKLTVLGGGGDKTHTCPPCPAPELLGGPSVFLFPPKPKDTLMISRTPEVTCVVVDVSHEDPEVKFNWYVDGVEVHNAKTKPCEEQYGSTYRCVSVLTVLHQDWLNGKEYKCKVSNKALPAPIEKTISKAKGGGGSGGGGSGGGGSGGGGSDKTHTCPPCPAPELLGGPSVFLFPPKPKDTLMISRTPEVTCVVVDVSHEDPEVKFNWYVDGVEVHNAKTKPCEEQYGSTYRCVSVLTVLHQDWLNGKEYKCKVSNKALPAPIEKTISKAKGQPREPQVYTLPPSREEMTKNQVSLTCLVKGFYPSDIAVEWESNGQPENNYKTTPPVLDSDGSFFLYSKLTVDKSRWQQGNVFSCSVMHEALHNHYTQKSLSLSPGKGGGGSGGGGSGGGGSGGGGSGQPREPQVYTLPPSREEMTKNQVSLTCLVKGFYPSDIAVEWESNGQPENNYKTTPPVLDSDGSFFLYSKLTVDKSRWQQGNVFSCSVMHEALHNHYTQKSLSLSPGK

SEQ ID NO: 1456 - protein, 994 aa, Artificial Sequence
  Synthetic peptide
QVQLVESGGGVVQSGRSLRLSCAASGFTFRNYGMHWVRQAPGKCLEWVAVIWYDGSDKYYADSVRGRFTISRDNSKNTLYLQMNSLRAEDTAVYYCARDGYDILTGNPRDFDYWGQGTLVTVSSGGGGSGGGGSGGGGSDTVMTQTPLSSHVTLGQPASISCRSSQSLVHSDGNTYLSWLQQRPGQPPRLLIYRISRRFSGVPDRFSGSGAGTDFTLEISRVEAEDVGVYYCMQSTHVPRTFGCGTKVEIKSGGGGSEVQLVESGGGLVQPGGSLKLSCAASGFTFNKYAMNWVRQAPGKGLEWVARIRSKYNNYATYYADSVKDRFTISRDDSKNTAYLQMNNLKTEDTAVYYCVRHGNFGNSYISYWAYWGQGTLVTVSSGGGGSGGGGSGGGGSQTVVTQEPSLTVSPGGTVTLTCGSSTGAVTSGNYPNWVQQKPGQAPRGLIGGTKFLAPGTPARFSGSLLGGKAALTLSGVQPEDEAEYYCVLWYSNRWVFGGGTKLTVLGGGGDKTHTCPPCPAPELLGGPSVFLFPPKPKDTLMISRTPEVTCVVVDVSHEDPEVKFNWYVDGVEVHNAKTKPCEEQYGSTYRCVSVLTVLHQDWLNGKEYKCKVSNKALPAPIEKTISKAKGGGGSGGGGSGGGGSGGGGSAPELLGGPSVFLFPPKPKDTLMISRTPEVTCVVVDVSHEDPEVKFNWYVDGVEVHNAKTKPCEEQYGSTYRCVSVLTVLHQDWLNGKEYKCKVSNKALPAPIEKTISKAKGQPREPQVYTLPPSREEMTKNQVSLTCLVKGFYPSDIAVEWESNGQPENNYKTTPPVLDSDGSFFLYSKLTVDKSRWQQGNVFSCSVMHEALHNHYTQKSLSLSPGKGGGGSGGGGSGGGGSGGGGSGQPREPQVYTLPPSREEMTKNQVSLTCLVKGFYPSDIAVEWESNGQPENNYKTTPPVLDSDGSFFLYSKLTVDKSRWQQGNVFSCSVMHEALHNHYTQKSLSLSPGK

SEQ ID NO: 1457 - protein, 984 aa, Artificial Sequence
  Synthetic peptide
QVQLVESGGGVVQSGRSLRLSCAASGFTFRNYGMHWVRQAPGKCLEWVAVIWYDGSDKYYADSVRGRFTISRDNSKNTLYLQMNSLRAEDTAVYYCARDGYDILTGNPRDFDYWGQGTLVTVSSGGGGSGGGGSGGGGSDTVMTQTPLSSHVTLGQPASISCRSSQSLVHSDGNTYLSWLQQRPGQPPRLLIYRISRRFSGVPDRFSGSGAGTDFTLEISRVEAEDVGVYYCMQSTHVPRTFGCGTKVEIKSGGGGSEVQLVESGGGLVQPGGSLKLSCAASGFTFNKYAMNWVRQAPGKGLEWVARIRSKYNNYATYYADSVKDRFTISRDDSKNTAYLQMNNLKTEDTAVYYCVRHGNFGNSYISYWAYWGQGTLVTVSSGGGGSGGGGSGGGGSQTVVTQEPSLTVSPGGTVTLTCGSSTGAVTSGNYPNWVQQKPGQAPRGLIGGTKFLAPGTPARFSGSLLGGKAALTLSGVQPEDEAEYYCVLWYSNRWVFGGGTKLTVLGGGGAPELLGGPSVFLFPPKPKDTLMISRTPEVTCVVVDVSHEDPEVKFNWYVDGVEVHNAKTKPCEEQYGSTYRCVSVLTVLHQDWLNGKEYKCKVSNKALPAPIEKTISKAKGGGGSGGGGSGGGGSGGGGSAPELLGGPSVFLFPPKPKDTLMISRTPEVTCVVVDVSHEDPEVKFNWYVDGVEVHNAKTKPCEEQYGSTYRCVSVLTVLHQDWLNGKEYKCKVSNKALPAPIEKTISKAKGQPREPQVYTLPPSREEMTKNQVSLTCLVKGFYPSDIAVEWESNGQPENNYKTTPPVLDSDGSFFLYSKLTVDKSRWQQGNVFSCSVMHEALHNHYTQKSLSLSPGKGGGGSGGGGSGGGGSGGGGSGQPREPQVYTLPPSREEMTKNQVSLTCLVKGFYPSDIAVEWESNGQPENNYKTTPPVLDSDGSFFLYSKLTVDKSRWQQGNVFSCSVMHEALHNHYTQKSLSLSPGK

SEQ ID NO: 1458 - protein, 17 aa, Artificial Sequence
  Synthetic peptide
ELKTPLGDTTHTCPRCP

SEQ ID NO: 1459 - protein, 15 aa, Artificial Sequence
  Synthetic peptide
EPKSCDKTHTCPPCP
